(19) United States
(12) Patent Application Publication
(10) Pub. No.: US 2023/0399643 A1
(43) Pub. Date: Dec. 14, 2023

(54) COMPLEMENT COMPONENT C1S INHIBITORS FOR TREATING A NEUROLOGICAL DISEASE, AND RELATED COMPOSITIONS, SYSTEMS AND METHODS OF USING SAME

(71) Applicant: Genentech, Inc., South San Francisco, CA (US)

(72) Inventors: Alexander MUNK, Ishoj (DK); Helene M. GYLLING, Copenhagen (DK); Jesse Eric HANSON, Belmont, CA (US); Lukasz J. KIELPINSKI, Hørsholm (DK)

(73) Assignee: Genentech, Inc., South San Francisco, CA (US)

(21) Appl. No.: 18/054,115

(22) Filed: Nov. 9, 2022

Related U.S. Application Data
(63) Continuation of application No. PCT/US2021/031294, filed on May 7, 2021.
(60) Provisional application No. 63/023,127, filed on May 11, 2020.

(51) Int. Cl. C12N 15/113

(52) U.S. Cl. CPC C12N 15/113; C12N 2310/11; C12N 2310/32; C12N 2310/315

(57) ABSTRACT

The present invention relates to complement component 1s (C1S) inhibitors for use in treatment of neurological diseases. The invention in particular relates to the use of C1S inhibitors for down-regulation of C1S expression. The invention also relates to nucleic acid molecules, which are complementary to C1S and capable of reducing the level of an C1S mRNA. Also comprised in the present invention is a pharmaceutical composition and its use in the treatment of neurological diseases.

### CROSS-REFERENCE TO RELATED APPLICATIONS

[0001] This application relates to U.S. Provisional Application filed May 11, 2020, entitled “Complement Component C4 Inhibitors For Treating A Neurological Disease, And Related Compositions, Systems And Methods Of Using Same” and US Provisional Application filed May 11, 2020, entitled “Complement Component C1R Inhibitors For Treating A Neurological Disease, And Related Compositions, Systems And Methods Of Using Same,” the contents of which are both incorporated herein by reference in their entireties. This application claims priority to U.S. Provisional Application No. 63/023,127, filed May 11, 2020, entitled “Complement Component C1S Inhibitors For Treating A Neurological Disease, And Related Compositions, Systems And Methods Of Using Same,” the contents of which are incorporated herein by reference in its entirety.

### SEQUENCE LISTING

[0002] This application contains a Sequence Listing, which has been submitted electronically in XML format and is hereby incorporated by reference in its entirety. Said XML copy, created on May 3, 2023, is named P36091-US-1_SL.xml and is 3,568,835 bytes in size.

### FIELD OF INVENTION

[0003] The present invention relates to complement component 1s (C1S) inhibitors for use in treatment of neurological diseases. The invention in particular relates to the use of C1S inhibitors for down-regulation of C1S expression. The invention also relates to nucleic acid molecules, which are complementary to C1S and capable of reducing the level of an C1S mRNA. Also comprised in the present invention is a pharmaceutical composition and its use in the treatment of neurological diseases.

### BACKGROUND

[0004] The complement system is a part of the innate immune system that enhances the clearance of microbes or damaged cells by phagocytes and promotes inflammation. The complement system also participates in synaptic pruning in the brain, with the classical pathway of the complement system mediating synapse removal. This process involves initiation of the classical pathway by the complement component 1 (C1) complex (consisting of C1Q, C1S and C1R), leading to cleavage of complement component 2 (C2) and complement component 4 (C4), which in turn lead to cleavage of complement component 3 (C3) followed by engulfment of synapses by microglia cells. Beyond roles in normal brain circuitry refinement during early development, it is well established that aberrant activity of the classical complement pathway can mediate synapse loss and neurodegeneration in various neurological diseases. Observations of elevated complement levels in patient samples and beneficial effects of reducing or eliminating complement components in mouse models have identified a damaging role for complement in conditions including, Alzheimer's disease, frontotemporal dementia, multiple sclerosis, amyotrophic lateral sclerosis, Huntington's disease, Parkinson's disease, virus-induced cognitive impairment, glaucoma, macular degeneration, myasthenia gravis, Guillain-Barré syndrome, neuromyelitis optica, central nervous system lupus erythematosus and schizophrenia.

[0005] There remains a need in the art for therapeutic and prognostic agents to address such conditions. The present invention meets these and other needs.

### OBJECTIVE OF THE INVENTION

[0006] The present invention provides nucleic acid inhibitors of complement component 1S (C1S) which may be used both in vivo and in vitro for down-regulation of C1S expression and for the prophylactic and therapeutic intervention in neurological diseases. The present invention further identifies novel nucleic acid molecules, such as antisense oligonucleotides, which are capable of inhibiting the expression of C1S in vitro and in vivo.

### SUMMARY OF INVENTION

[0007] The present invention relates to oligonucleotides targeting a nucleic acid and capable of modulating the expression of C1S, useful, for example, to treat or prevent diseases related to the functioning of the C1S.

[0008] Accordingly, in a first aspect, the invention provides a C1S inhibitor for use in the treatment and/or prevention of neurological diseases, such as tauopathies or schizophrenia, in particular, a C1S inhibitor is capable of reducing the amount of C1S, such as C1S mRNA and/or C1S protein. Such an inhibitor is advantageously a nucleic acid molecule of 12 to 60 nucleotides in length, which is capable of reducing C1S mRNA levels.

[0009] In a further aspect, the invention relates to a nucleic acid molecule of 12-60 nucleotides, such as of 12-30 nucleotides, comprising a contiguous nucleotide sequence of at least 10 nucleotides, in particular of 16 to 20 nucleotides, which is at least 90% complementary, such as 90-95%, 95-98%, or fully complementary to a mammalian C1S, e.g. a human C1S, a mouse C1s1, C1s2 or a cynomolgus monkey C1S, C1S. Such a nucleic acid molecule is capable of inhibiting the expression of C1S in a cell expressing C1S. The inhibition of C1S allows for a reduction of the amount of C1S present in the cell. The nucleic acid molecule can be selected from a single stranded antisense oligonucleotide, a double stranded siRNA molecule or a shRNA nucleic acid molecule (in particular a chemically produced shRNA molecules).

[0010] A further aspect of the present invention relates to single stranded antisense oligonucleotides or siRNAs that inhibit the expression and/or activity of C1S. In particular, modified antisense oligonucleotides or modified siRNAs comprising one or more 2′ sugar modified nucleoside(s) and one or more phosphorothioate linkage(s), which reduce C1S mRNA are advantageous.

[0011] In a further aspect, the invention provides pharmaceutical compositions comprising the C1S inhibitor of the present invention, such as the antisense oligonucleotide or siRNA of the invention and a pharmaceutically acceptable excipient.

[0012] In a further aspect, the invention provides methods for in vivo or in vitro modulation of C1S expression in a target cell, which is expressing C1S, by administering an C1S inhibitor of the present invention, such as an antisense oligonucleotide or composition of the invention in an effective amount to said cell. In some embodiments, the C1S expression is reduced by at least 50%, e.g., 50-60%; or at least 60%, e.g., 60-70%; or at least 70%, e.g., 70-80%; or at least 80%, e.g., 80-90%; or at least 90%, e.g., 90-95%, in the target cell compared to the level without any treatment or treated with a control.

[0013] In a further aspect, the invention provides methods for treating or preventing a disease, disorder or dysfunction associated with in vivo activity of C1S comprising administering a therapeutically or prophylactically effective amount of the C1S inhibitor of the present invention, such as the antisense oligonucleotide or siRNA of the invention to a subject suffering from or susceptible to the disease, disorder or dysfunction.

### Definitions

[0014] Compound

[0015] Herein, the term “compound”, with respect to a compound of the invention, means any molecule capable of inhibition C1S expression or activity. Particular compounds of the invention are nucleic acid molecules, such as RNAi molecules or antisense oligonucleotides according to the invention or any conjugate comprising such a nucleic acid molecule. For example, herein the compound may be a nucleic acid molecule targeting C1S, in particular an antisense oligonucleotide or a siRNA. In some embodiments, the compound is herein also referred to as an “inhibitor” or a “C1S inhibitor”.

[0016] Oligonucleotide

[0017] The term “oligonucleotide” as used herein is defined as it is generally understood by the skilled person, such as, as a molecule comprising two or more covalently linked nucleosides. An oligonucleotide is also referred to herein as a “nucleic acid” or “nucleic acid molecule”. Such covalently bound nucleosides may also be referred to as nucleic acid molecules or oligomers. The oligonucleotides referred to in the description and claims are generally therapeutic oligonucleotides below 70 nucleotides in length. The oligonucleotide may be or comprise a single stranded antisense oligonucleotide, or may be another nucleic acid molecule, such as a CRISPR RNA, an siRNA, an shRNA, an aptamer, or a ribozyme. Therapeutic oligonucleotide molecules are commonly made in the laboratory by solid-phase chemical synthesis followed by purification and isolation. shRNA's are often delivered to cells using lentiviral vectors from which they are then transcribed to produce single stranded RNA that will form a stem loop (hairpin) RNA structure capable of interacting with RNA interference machinery (including the RNA-induced silencing complex (RISC)). In an embodiment of the present invention, the shRNA is a chemically produced shRNA molecule (not relying on cell based expression from plasmids or viruses). When referring to a sequence of the oligonucleotide, reference is made to the sequence or order of nucleobase moieties, or modifications thereof, of the covalently linked nucleotides or nucleosides. Generally, the oligonucleotide of the invention is man-made, and is chemically synthesized, and is typically purified or isolated. Although in some embodiments, the oligonucleotide of the invention is an shRNA transcribed from a vector upon entry into the target cell. The oligonucleotide of the invention may comprise one or more modified nucleosides or nucleotides.

[0018] In some embodiments, the term oligonucleotide of the invention also includes pharmaceutically acceptable salts, esters, solvates and prodrugs thereof.

[0019] In some embodiments, the oligonucleotide of the invention comprises or consists of 10 to 70 nucleotides in length, such as from 12 to 60, such as from 13 to 50, such as from 14 to 40, such as from 15 to 30, such as from 16 to 25, such as from 16 to 22, such as from 16 to 20 contiguous nucleotides in length. Accordingly, the oligonucleotide of the present invention, in some embodiments, may have a length of 12 to 25 nucleotides. Alternatively, the oligonucleotide of the present invention, in some embodiments, may have a length of 15 to 21 nucleotides.

[0020] In some embodiments, the oligonucleotide, or a contiguous nucleotide sequence thereof, comprises or consists of 24 or less nucleotides, such as 22, such as 20 or less nucleotides, such as 14, 15, 16, 17, 18, 19, 20 or 21 nucleotides. It is to be understood that any range given herein includes the range endpoints. Accordingly, if a nucleic acid molecule is said to include from 15 to nucleotides, both 15 and 20 nucleotide lengths are included.

[0021] In some embodiments, the contiguous nucleotide sequence comprises or consists of 12, 13, 14, 15, 16, 17, 18, 19, 20, 21 or 22 contiguous nucleotides in length.

[0022] The oligonucleotide(s) can modulate the expression of a target nucleic acid in a mammal or in a mammalian cell. In some embodiments, the nucleic acid molecules, such as for siRNAs, shRNAs and antisense oligonucleotides inhibit expression of a target nucleic acid(s).

[0023] In one embodiment of the invention, the oligonucleotide is selected from an RNAi agent, such as an siRNA or shRNA. In another embodiment, the oligonucleotide is a single stranded antisense oligonucleotide, such as a high affinity modified antisense oligonucleotide interacting with RNase H.

[0024] In some embodiments, the oligonucleotide of the invention may comprise one or more modified nucleosides or nucleotides, such as 2′ sugar modified nucleosides.

[0025] In some embodiments, the oligonucleotide comprises phosphorothioate internucleoside linkages.

[0026] A library of oligonucleotides is to be understood as a collection of different oligonucleotides. The purpose of the library of oligonucleotides can vary. In some embodiments, the library of oligonucleotides is composed of oligonucleotides with overlapping nucleobase sequence targeting one or more mammalian C1S target nucleic acids, designed for the purpose of identifying potent sequences, e.g., the most potent sequence, within the library of oligonucleotides. In some embodiments, the library of oligonucleotides is a library of oligonucleotide design variants (child nucleic acid molecules) of a parent or ancestral oligonucleotide, wherein the oligonucleotide design variants retain a core nucleobase sequence of the parent nucleic acid molecule, e.g., a conserved sequence of the parent.

[0027] Antisense Oligonucleotides

[0028] The term “antisense oligonucleotide” or “ASO” as used herein is defined as oligonucleotides capable of hybridizing to a target nucleic acid, in particular to a contiguous sequence on a target nucleic acid, e.g., to modulate expression of the corresponding target gene. Generally, nucleic acid molecules of the invention are antisense nucleic acids. The antisense oligonucleotides are not essentially double stranded and need not be siRNAs or shRNAs. Preferably, the antisense oligonucleotides of the present invention are single stranded. It is understood that single stranded oligonucleotides of the present invention can form hairpins or intermolecular duplex structures (duplex between two molecules of the same oligonucleotide), e.g., where the degree of intra or inter self-complementarity is less than 50% across of the full length of the oligonucleotide.

[0029] Advantageously, in some embodiments, the single stranded antisense oligonucleotide of the invention does not contain RNA nucleosides, since this will decrease nuclease resistance.

[0030] Advantageously, in some embodiments, the oligonucleotide of the invention comprises one or more modified nucleosides or nucleotides, such as 2′ sugar modified nucleosides. Furthermore, it is advantageous that, some, most, or all of the nucleosides, which are not modified, are DNA nucleosides, e.g., 50%, 75%, 95%, or 100% of the nucleosides which are not modified are DNA nucleosides.

[0031] RNAi Molecules

[0032] Herein, the term “RNA interference (RNAi) molecule” refers to short double-stranded oligonucleotide containing RNA nucleosides and which mediates targeted cleavage of an RNA transcript via the RNA-induced silencing complex (RISC), where they interact with the catalytic RISC component argonaute. The RNAi molecule modulates, e g., inhibits, the expression of the target nucleic acid in a cell, e.g. a cell within a subject, such as a mammalian subject. RNAi molecules includes single stranded RNAi molecules (Lima at al 2012 Cell 150: 883) and double stranded siRNAs, as well as short hairpin RNAs (shRNAs). In some embodiments of the invention, the oligonucleotide of the invention or contiguous nucleotide sequence thereof is a RNAi agent, such as a siRNA.

[0033] siRNA

[0034] The term “small interfering ribonucleic acid” or “siRNA” refers to a small interfering ribonucleic acid RNAi molecule that generally interferes with the expression of an mRNA. The term refers to a class of double-stranded RNA molecules, also known in the art as short interfering RNA or silencing RNA. siRNAs typically comprise a sense strand (also referred to as a passenger strand) and an antisense strand (also referred to as the guide strand), wherein one or both strands are of 17 to 30 nucleotides in length, typically 19 to 25 nucleosides in length, wherein the antisense strand is complementary, such as at least 90%, e.g., 90-95% complementary, or such as fully complementary, to the target nucleic acid (suitably a mature mRNA sequence), and the sense strand is complementary to the antisense strand so that the sense strand and antisense strand form a duplex or duplex region. siRNA strands may form a blunt ended duplex, or advantageously the sense and/or antisense strand 3′ end may form a 3′ overhang of, e.g. 1, 2, or 3 nucleosides (e.g., to resemble the product produced by Dicer, which forms the RISC substrate in vivo. Effective extended forms of Dicer substrates have been described in U.S. Pat. Nos. 8,349,809 and 8,513,207, hereby incorporated by reference. In some embodiments, both the sense strand and antisense strand have a 2nt 3′ overhang. The duplex region may therefore be, for example 17 to 25 nucleotides in length, such as 21 to 23 nucleotide in length.

[0035] Once inside a cell the antisense strand can be incorporated into the RISC complex, which mediate target degradation or target inhibition of the target nucleic acid. siRNAs typically comprise modified nucleosides in addition to RNA nucleosides. In one embodiment, the siRNA molecule may be chemically modified using modified internucleotide linkages and 2′ sugar modified nucleosides, such as 2′-4′ bicyclic ribose modified nucleosides, including LNA and cET or 2′ substituted modifications like of 2′-O-alkyl-RNA, 2′-O-methyl-RNA, 2′-alkoxy-RNA, 2′-O-methoxyethyl-RNA (MOE), 2′-amino-DNA, 2′-fluoro-DNA, arabino nucleic acid (ANA), 2′-fluoro-ANA. In particular, 2′fluoro, 2′-O-methyl or 2′-O-methoxyethyl may be incorporated into siRNAs.

[0036] In some embodiments, some, most, or all (e.g., 75-90%, 80-95%, 90-99%, or 100%) of the nucleotides of an siRNA sense (passenger) strand may be modified with 2′ sugar modified nucleosides such as LNA (see WO2004/083430 and WO2007/085485, for example). In some embodiments, the passenger stand of the siRNA may be discontinuous (see WO2007/107162 for example). In some embodiments, thermally destabilizing nucleotides at a seed region of the antisense strand of siRNAs are useful in reducing off-target activity of the siRNAs (see WO2018/098328 for example). In some embodiments, the siRNA comprises a 5′ phosphate group or a 5′-phosphate mimic at the 5′ end of the antisense strand. In some embodiments, the 5′ end of the antisense strand is a RNA nucleoside.

[0037] In one embodiment, the siRNA molecule further comprises at least one phosphorothioate or methylphosphonate internucleoside linkage. The phosphorothioaie or methylphosphonate internucleoside linkage may be at the 3′-terminus of one or both strands (e.g., the antisense strand and/or the sense strand); or the phosphorothioate or methylphosphonate internucleoside linkage may be at the 5′-terminus of one or both strands (e.g., the antisense strand and/or the sense strand); or the phosphorothioate or methylphosphonate internucleoside linkage may be at both the 5′- and 3′-termini of one or both strands (e.g., the antisense strand and/or the sense strand). In some embodiments, the remaining internucleoside linkages are phosphodiester linkages. In some embodiments, the siRNA molecule comprises one or more phosphorothioate internucleoside linkages. In siRNA molecules, phosphorothioate internucleoside linkages may reduce or inhibit nuclease cleavage in RICS. Accordingly, in some embodiments, not all internucleoside linkages in the antisense strand are modified, e.g., in some embodiments, 10-90%, 20-80%, 30-70%, or 40-60% of internucleoside linkages in the antisense strand are modified.

[0038] The siRNA molecule may further comprise a ligand. In some embodiments, the ligand is conjugated to the 3′ end of the sense strand.

[0039] For biological distribution, siRNAs may be conjugated to a targeting ligand, and/or be formulated into lipid nanoparticles. In a particular example, the nucleic acid molecule is conjugated to a moiety that targets a brain cell or other cell of the CNS. Thus, the nucleic acid molecule may be conjugated to a moiety that facilitates delivery across the blood brain barrier. For example, the nucleic acid molecule may be conjugated to an antibody or antibody fragment targeting the transferrin receptor.

[0040] Other aspects of the invention relate to pharmaceutical compositions, in particular, pharmaceutical compositions comprising dsRNA, such as siRNA molecules suitable for therapeutic use, and methods of inhibiting the expression of a target gene by administering the dsRNA molecules such as siRNAs of the invention, e.g., for the treatment of various disease conditions as disclosed herein.

[0041] shRNA

[0042] The term “short hairpin RNA” or “shRNA” refers to molecules that are generally between 40 and 70 nucleotides in length, such as between 45 and 65 nucleotides in length, such as 50 and 60 nucleotides in length and form a stem loop (hairpin) RNA structure which can interact with the endonuclease known as Dicer (believed to processes dsRNA into 19-23 base pair short interfering RNAs with characteristic two base 3′ overhangs which then can be incorporated into an RNA-induced silencing complex (RISC)). Upon binding to the appropriate target mRNA, one or more endonucleases within the RISC cleave the target to induce silencing. shRNA oligonucleotides may be chemically modified using modified internucleotide linkages and 2′ sugar modified nucleosides, such as 2′-4′ bicyclic ribose modified nucleosides, including LNA and cET or 2′ substituted modifications like of 2′-O-alkyl-RNA, 2′-O-methyl-RNA, 2′-alkoxy-RNA, 2′-O-methoxyethyl-RNA (MOE), 2′-amino-DNA, 2′-fluoro-DNA, arabino nucleic acid (ANA), 2′-fluoro-ANA. In some embodiments, an shRNA molecule comprises one or more phosphorothioate internucleoside linkages. In RNAi molecules, phosphorothioate internucleoside linkages may reduce or inhibit nuclease cleavage in RICS. Accordingly, not all internucleoside linkages in the stem loop of the shRNA molecule are modified, e.g., in some embodiments, 10-90%, 20-80%, 30-70%, or 40-60% of internucleoside linkages in the antisense strand are modified. Phosphorothioate internucleoside linkages can advantageously be placed in the 3′ and/or 5′ end of the stem loop of the shRNA molecule, in particular, in the part of the molecule that is not complementary to the target nucleic acid. The region of the shRNA molecule that is complementary to the target nucleic acid may however also be modified, e.g., in the first 2 to 3 internucleoside linkages in the part that is predicted to become the 3′ and/or 5′ terminal following cleavage by Dicer.

[0043] Contiguous Nucleotide Sequence

[0044] The term “contiguous nucleotide sequence” refers to the region of the nucleic acid molecule, which is complementary to the target nucleic acid. The term is used interchangeably herein with the term “contiguous nucleobase sequence” and the term “oligonucleotide motif sequence”. In some embodiments, all the nucleotides of the oligonucleotide constitute the contiguous nucleotide sequence. In some embodiments, the contiguous nucleotide sequence is included in the guide strand of an siRNA molecule. In some embodiments, the contiguous nucleotide sequence is the part of an shRNA molecule, which is 95%, 98%, 99%, or 100% complementary to the target nucleic acid. In some embodiments, the oligonucleotide comprises the contiguous nucleotide sequence, such as a F-G-F′ gapmer region, and may optionally comprise further nucleotide(s), for example, a nucleotide linker region which may be used to attach a functional group (e.g. a conjugate group for targeting) to the contiguous nucleotide sequence. The nucleotide linker region may or may not be complementary to the target nucleic acid. In some embodiments, the nucleobase sequence of the antisense oligonucleotide is the contiguous nucleotide sequence. In some embodiments, the contiguous nucleotide sequence is 100% complementary to the target nucleic acid.

[0045] Nucleotides and Nucleosides

[0046] Nucleotides and nucleosides are the building blocks of oligonucleotides and polynucleotides, and for the purposes of the present invention include both naturally occurring and non-naturally occurring nucleotides and nucleosides. In nature, nucleotides, such as DNA and RNA nucleotides comprise a ribose sugar moiety, a nucleobase moiety and one or more phosphate groups (which is absent in nucleosides). Nucleosides and nucleotides may also interchangeably be referred to as “units” or “monomers”.

[0047] Modified Nucleoside

[0048] The term “modified nucleoside” or “nucleoside modification” as used herein refers to nucleosides modified as compared to the equivalent DNA or RNA nucleoside by the introduction of one or more modifications of the sugar moiety or the (nucleo)base moiety. Advantageously, in some embodiments, one or more of the modified nucleoside comprises a modified sugar moiety. The term “modified nucleoside” may also be used herein interchangeably with the term “nucleoside analogue” or “modified unit” or “modified monomer”. Nucleosides with an unmodified DNA or RNA sugar moiety are termed DNA or RNA nucleosides herein. Nucleosides with modifications in the base region of the DNA or RNA nucleoside are still generally termed DNA or RNA if they allow Watson Crick base pairing.

[0049] Modified Internucleoside Linkage

[0050] The term “modified internucleoside linkage” is defined as generally understood by the skilled person, such as, as being a linkage other than phosphodiester (PO) linkages, that covalently couples two nucleosides together. The oligonucleotides of the invention may therefore comprise one or more modified internucleoside linkages, such as a one or more phosphorothioate internucleoside linkages, or one or more phosphorodithioate internucleoside linkages.

[0051] With the oligonucleotide of the invention, it can be advantageous to use phosphorothioate internucleoside linkages, e.g., for 10-90%, 20-80%, 30-70%, or 40-60% of internucleoside linkages.

[0052] Phosphorothioate internucleoside linkages are particularly useful due to nuclease resistance, beneficial pharmacokinetics, and ease of manufacture. In some embodiments, at least 50% of the internucleoside linkages in the oligonucleotide, or contiguous nucleotide sequence thereof, are phosphorothioate, such as at least 60%, e.g., 60-80%; such as at least 70%, e.g., 70-85%; such as at least 75%, e.g., 75-90%; such as at least 80%, e.g. 80-95%; or such as at least 90%, e.g., 90-99%, of the internucleoside linkages in the oligonucleotide, or contiguous nucleotide sequence thereof, are phosphorothioate. In some embodiments, all of the internucleoside linkages of the oligonucleotide, or contiguous nucleotide sequence thereof, are phosphorothioate.

[0053] In some advantageous embodiments, all the internucleoside linkages of the contiguous nucleotide sequence of the oligonucleotide are phosphorothioate, or all the internucleoside linkages of the oligonucleotide are phosphorothioate linkages.

[0054] In some embodiments, the antisense oligonucleotides may comprise other internucleoside linkages (other than phosphodiester and phosphorothioate), for example alkyl phosphonate/methyl phosphonate internucleoside linkages, which may be tolerated in an otherwise DNA phosphorothioate gap region (e.g., as in EP 2 742 135).

[0055] Nucleobase

[0056] The term “nucleobase” includes the purine (e.g. adenine and guanine) and pyrimidine (e.g. uracil, thymine and cytosine) moiety present in nucleosides and nucleotides, which form hydrogen bonds in nucleic acid hybridization. In the context of the present invention, the term nucleobase also encompasses modified nucleobases, which may differ from naturally occurring nucleobases, but are functional during nucleic acid hybridization. In this context, “nucleobase” refers to both naturally occurring nucleobases such as adenine, guanine, cytosine, thymidine, uracil, xanthine and hypoxanthine, as well as non-naturally occurring variants. Such variants are for example described in Hirao et al (2012) Accounts of Chemical Research vol 45 page 2055 and Bergstrom (2009) Current Protocols in Nucleic Acid Chemistry Suppl. 37 1.4.1.

[0057] In some embodiments, the nucleobase moiety is modified by changing the purine or pyrimidine into a modified purine or pyrimidine, such as substituted purine or substituted pyrimidine, such as a nucleobase selected from isocytosine, pseudoisocytosine, 5-methyl cytosine, 5-thiozolo-cytosine, 5-propynyl-uracil, 5-bromouracil 5-thiazolo-uracil, 2-thio-uracil, 2′thio-thymine, inosine, diaminopurine, 6-aminopurine, 2-aminopurine, 2,6-diaminopurine and 2-chloro-6-aminopurine.

[0058] The nucleobase moieties may be indicated by the letter code for each corresponding nucleobase, e.g. A, T, G, C or U, wherein each letter may optionally include modified nucleobases of equivalent function. For example, in the exemplified oligonucleotides, the nucleobase moieties are selected from A, T, G, C, and 5-methyl cytosine. Optionally, for LNA gapmers, 5-methyl cytosine LNA nucleosides may be used.

[0059] Modified Oligonucleotide

[0060] The term “modified oligonucleotide” describes an oligonucleotide comprising one or more sugar-modified nucleosides and/or modified internucleoside linkages and/or modified nucleobases. The term “chimeric oligonucleotide” is a term that has been used in the literature to describe oligonucleotides comprising modified nucleosides and DNA nucleosides. The antisense oligonucleotide of the invention is advantageously a chimeric oligonucleotide.

[0061] Complementarity

[0062] The term “complementarity” or “complementary” describes the capacity for Watson-Crick base-pairing of nucleosides/nucleotides. Watson-Crick base pairs are guanine (G)-cytosine (C) and adenine (A)-thymine (T)/uracil (U). It will be understood that oligonucleotides may comprise nucleosides with modified nucleobases, for example 5-methyl cytosine is often used in place of cytosine, and as such the term complementarity encompasses Watson Crick base-paring between non-modified and modified nucleobases (see for example Hirao et al (2012) Accounts of Chemical Research vol 45 page 2055 and Bergstrom (2009) Current Protocols in Nucleic Acid Chemistry Suppl. 37 1.4.1).

[0063] The term “% complementary” as used herein, refers to the proportion of nucleotides (in percent) of a contiguous nucleotide sequence in a nucleic acid molecule (e.g. oligonucleotide) which across the contiguous nucleotide sequence, are complementary to a reference sequence (e.g. a target sequence or sequence motif). The percentage of complementarity is thus calculated by counting the number of aligned nucleobases that are complementary (from Watson Crick base pair) between the two sequences (when aligned with the target sequence 5′-3′ and the oligonucleotide sequence from 3′-5′), dividing that number by the total number of nucleotides in the oligonucleotide and multiplying by 100. In such a comparison, a nucleobase/nucleotide, which does not align (form a base pair), is termed a mismatch. Insertions and deletions are not allowed in the calculation of complementarity of a contiguous nucleotide sequence. It will be understood that in determining complementarity, chemical modifications of the nucleobases are disregarded as long as the functional capacity of the nucleobase to form Watson Crick base pairing is retained (e.g. 5′-methyl cytosine is considered identical to a cytosine for the purpose of calculating % identity).

[0064] The term “fully complementary”, refers to 100% complementarity.

[0065] Identity

[0066] The term “Identity” as used herein, refers to the proportion of nucleotides (expressed in percent) of a contiguous nucleotide sequence in a nucleic acid molecule (e.g. oligonucleotide) which across the contiguous nucleotide sequence, are identical to a reference sequence (e.g. a sequence motif). The percentage of identity is thus calculated by counting the number of aligned nucleobases that are identical (a Match) between two sequences (in the contiguous nucleotide sequence of the compound of the invention and in the reference sequence), dividing that number by the total number of nucleotides in the oligonucleotide and multiplying by 100. Therefore, Percentage of Identity=(Matches×100)/Length of aligned region (e.g. the contiguous nucleotide sequence). Insertions and deletions are not allowed in the calculation the percentage of identity of a contiguous nucleotide sequence. It will be understood that in determining identity, chemical modifications of the nucleobases are disregarded as long as the functional capacity of the nucleobase to form Watson Crick base pairing is retained (e.g. 5-methyl cytosine is considered identical to a cytosine for the purpose of calculating % identity).

[0067] Hybridization

[0068] The term “hybridizing” or “hybridizes” as used herein is to be understood as referring to two nucleic acid strands (e.g. an oligonucleotide and a target nucleic acid) forming hydrogen bonds between base pairs on opposite strands, thereby forming a duplex. The affinity of the binding between two nucleic acid strands is the strength of the hybridization. It is often described in terms of the melting temperature (Tm) defined as the temperature at which half of the oligonucleotides are duplexed with the target nucleic acid. At physiological conditions, Tm is not strictly proportional to the affinity (Mergny and Lacroix, 2003, Oligonucleotides 13:515-537). The standard state Gibbs free energy ΔG° is a more accurate representation of binding affinity and is related to the dissociation constant (Kd) of the reaction by ΔG°=−RTIn(Kd), where R is the gas constant and T is the absolute temperature. Therefore, a very low ΔG° of the reaction between an oligonucleotide and the target nucleic acid reflects a strong hybridization between the oligonucleotide and target nucleic acid. ΔG° is the energy associated with a reaction where aqueous concentrations are 1M, the pH is 7, and the temperature is 37° C. The hybridization of oligonucleotides to a target nucleic acid is a spontaneous reaction and for spontaneous reactions, ΔG° is less than zero. ΔG° can be measured experimentally, for example, by use of the isothermal titration calorimetry (ITC) method as described in Hansen et al., 1965, Chem. Comm. 36-38 and Holdgate et al., 2005, Drug Discov Today. The skilled person will know that commercial equipment is available for ΔG° measurements. ΔG° can also be estimated numerically by using the nearest neighbor model as described by SantaLucia, 1998, Proc Natl Acad Sci USA. 95: 1460-1465 using appropriately derived thermodynamic parameters described by Sugimoto et al., 1995, Biochemistry 34:11211-11216 and McTigue et al., 2004, Biochemistry 43:5388-5405. In order to have the possibility of modulating a nucleic acid target by hybridization, oligonucleotides of the present invention hybridize to a target nucleic acid with estimated ΔG° values below −10 kcal/mol for oligonucleotides that are 10 to 30 nucleotides in length. In some embodiments, the degree or strength of hybridization is measured by the standard state Gibbs free energy ΔG°. The oligonucleotides may hybridize to a target nucleic acid with estimated ΔG° values below −10 kcal/mol, such as below −15 kcal/mol, such as below −20 kcal/mol and such as below −25 kcal/mol for oligonucleotides that are 8 to 30 nucleotides in length. In some embodiments, the oligonucleotides hybridize to a target nucleic acid with an estimated ΔG° value in the range of −10 to −60 kcal/mol, such as −12 to −40, such as from −15 to −30 kcal/mol or −16 to −27 kcal/mol such as −18 to −25 kcal/mol.

[0069] Target Nucleic Acid

[0070] According to the present invention, the target nucleic acid is a nucleic acid, which encodes a mammalian C1S and may for example be a gene, a RNA, a mRNA, and pre-mRNA, a mature mRNA or a cDNA sequence. The target may therefore be referred to as C1S target nucleic acid.

[0071] The therapeutic oligonucleotides of the invention may for example target exon regions of a mammalian C1S (in particular siRNA and shRNA, but also antisense oligonucleotides), or may for example target any intron region in the C1S pre-mRNA (in particular antisense oligonucleotides).

[0072] Table 1a lists predicted exon and intron regions of SEQ ID NO: 3, i.e. of the human C1S pre-mRNA sequence.

TABLE 1a
Exons and introns in the human C1S pre-mRNA.

| Exemplary exonic regions in | | | Exemplary intronic regions in | | |
|---|---|---|---|---|---|
| the human C1S premRNA | | | the human C1S premRNA | | |
| (SEQ ID NO 3) | | | (SEQ ID NO 3) | | |
| ID | start | end | ID | start | end |
| E1 | 72418 | 72619 | I1 | 72620 | 73493 |
| E2 | 73494 | 73659 | I2 | 73660 | 74216 |
| E3 | 74217 | 74424 | I3 | 74425 | 74631 |
| E4 | 74632 | 74809 | I4 | 74810 | 75143 |
| E5 | 75144 | 75154 | I5 | 75155 | 75810 |
| E6 | 75811 | 75847 | I6 | 75848 | 76035 |
| E7 | 76036 | 76134 | I7 | 76135 | 76841 |
| E8 | 76842 | 76966 | I8 | 76967 | 77122 |
| E9 | 77123 | 77198 | I9 | 77199 | 77562 |
| E10 | 77563 | 77712 | I10 | 77713 | 78259 |
| E11 | 78260 | 78375 | I11 | 78376 | 78780 |
| E12 | 78781 | 78859 | I12 | 78860 | 79384 |
| E13 | 79385 | 79513 | I13 | 79514 | 79530 |
| E14 | 79531 | 79547 | I14 | 79548 | 80196 |
| E15 | 80197 | 80272 | I15 | 80273 | 81596 |
| E16 | 81597 | 82771 | | | |

[0073] In some embodiments, the target nucleic acid encodes a C1S protein, in particular a mammalian C1S protein, such as a human C1S protein. See for example Table 2 and Table 3, which provides an overview on the genomic sequences of human, cyno monkey and mouse C1S (Table 2) and on pre-mRNA sequences for human, monkey and mouse C1S and for the mature mRNAs for human C1S (Table 3).

[0074] In some embodiments, the target nucleic acid is selected from the group consisting of SEQ ID NO: 1, 2, 3, 4, 5, and 6, or naturally occurring variants thereof (e.g. sequences encoding a mammalian C1S).

TABLE 2
Genome and assembly information for C1S across species.

| | | | | | | NCBI reference |
|---|---|---|---|---|---|---|
| | | | | | | sequence* |
| | | | Genomic coordinates | | | accession number |
| Species | Chr | Strand | Start | End | Assembly | for mRNA |
| Mouse | 6 | Rev | 124530345 | 124542359 | GRCm38.p6 | NM_144938.2, |
| | | | | | | and |
| | | | | | | NM_001097617.1 |
| Mouse | 6 | Rev | 124624625 | 124636085 | GRCm38.p6 | NM_173864.2 |
| Human | 12 | Fwd | 6988259 | 7071032 | GRCh38.p12 | NM_001734.5, |
| | | | | | | NM_001346850.2, |
| | | | | | | and NM_201442.4 |
| Cyno | 11 | Fwd | 7495109 | 7508845 | Macaca fascicularis_5 | — |
| Cyno | 11 | Fwd | 7387971 | 7398559 | Macaca_fascicularis_5 | — |

Fwd = forward strand.
Rev = reverse strand.
The genome coordinates provide the pre-mRNA sequence (genomic sequence).

[0075] If employing the nucleic acid molecule of the invention in research or diagnostics, the target nucleic acid may be a cDNA or a synthetic nucleic acid derived from DNA or RNA.

[0076] For in vivo or in vitro application, the therapeutic nucleic acid molecule of the invention is typically capable of inhibiting the expression of the C1S target nucleic acid in a cell, which is expressing the C1S target nucleic acid. The contiguous sequence of nucleobases of the nucleic acid molecule of the invention is typically complementary to a conserved region of the C1S target nucleic acid, as measured across the length of the nucleic acid molecule, optionally with the exception of one or two mismatches. In some embodiments, the target nucleic acid is a messenger RNA, such as a pre-mRNA which encodes mammalian C1S protein, such as mouse C1s1, e.g. the mouse C1s1 pre-mRNA sequence, such as that disclosed as SEQ ID NO: 1, the human C1S pre-mRNA sequence, such as that disclosed as SEQ ID NO: 3, or the cyno monkey C1S pre-mRNA sequence, such as that disclosed as SEQ ID NO: 4, or a mature C1S mRNA, such as that of a human mature mRNA disclosed as SEQ ID NO: 6. In some embodiments, the target nucleic acid is a messenger RNA, such as a pre-mRNA which encodes mammalian C1S protein, such as mouse C1s2, e.g. the mouse C1s2 pre-mRNA sequence, such as that disclosed as SEQ ID NO: 2, the human C1S pre-mRNA sequence, such as that disclosed as SEQ ID NO: 3, or the cyno monkey C1S pre-mRNA sequence, such as that disclosed as SEQ ID NO: 5, or a mature C1S mRNA, such as that of a human mature mRNA disclosed as SEQ ID NO: 6. SEQ ID NOs: 1, 2, 3, 4, 5 and 6 are DNA sequences—it will be understood that target RNA sequences have uracil (U) bases in place of the thymidine bases (T).

[0077] It is known that different, i.e. shorter, annotated mRNA isoforms of the above sequences exist. The isoforms are well-known in the art and can be derived from the known sequence databases.

[0078] Further information on exemplary target nucleic acids is provided in Tables 2 and 3.

TABLE 3
Overview on target nucleic acids.

| Target Nucleic Acid, Species, Reference | Sequence ID |
|---|---|
| C1s1 Mus musculus pre-mRNA | SEQ ID NO: 1 |
| C1s2 Mus musculus pre-mRNA | SEQ ID NO: 2 |
| C1S Homo sapiens pre-mRNA | SEQ ID NO: 3 |
| C1S Macaca fascicularis pre-mRNA | SEQ ID NO: 4 |
| C1S Macaca fascicularis pre-mRNA | SEQ ID NO: 5 |
| C1S Homo sapiens mature mRNA | SEQ ID NO: 6 |

[0079] In some embodiments, the target nucleic acid is SEQ ID NO: 1.

[0080] In some embodiments, the target nucleic acid is SEQ ID NO: 2.

[0081] In some embodiments, the target nucleic acid is SEQ ID NO: 3.

[0082] In some embodiments, the target nucleic acid is SEQ ID NO: 4.

[0083] In some embodiments, the target nucleic acid is SEQ ID NO: 5.

[0084] In some embodiments, the target nucleic acid is SEQ ID NO: 6.

[0085] Target

[0086] The term “target” as used herein refers to the complement component 1s (C1S), which can in the context of this disclosure be C1S. C1S is frequently also referred to as EDSPD2 or complement C1s. Further, the term “target” can refer to the C1S target nucleic acid, as well as the C1S protein.

[0087] Target Sequence

[0088] The term “target sequence” as used herein refers to a sequence of nucleotides present in the target nucleic acid, which comprises the nucleobase sequence, which is complementary to the oligonucleotide or nucleic acid molecule of the invention. In some embodiments, the target sequence comprises or consists of a region on the target nucleic acid with a nucleobase sequence that is complementary to the contiguous nucleotide sequence of the oligonucleotide of the invention. This region of the target nucleic acid may interchangeably be referred to as the target nucleotide sequence, target sequence or target region. In some embodiments, the target sequence is longer than the complementary sequence of a nucleic acid molecule of the invention, and may, for example represent a preferred region of the target nucleic acid, which may be targeted by several nucleic acid molecules of the invention. It is well known in the art that C1S genes display high level of variability between individuals. The term “target sequence” encompasses all publicly annotated variants of C1S.

[0089] In some embodiments, the target sequence is a sequence selected from the group consisting of a human C1S mRNA exon, such as a human C1S mRNA exon selected from the group consisting of Ea1-Ea16 (see for example Table 1a above).

[0090] Accordingly, the invention provides for an oligonucleotide, wherein said oligonucleotide comprises a contiguous sequence, which is at least 90% complementary, such as 90-95% or fully complementary, to an exon region of SEQ ID NO: 3, selected from the group consisting of Ea1-Ea16 (see Table 1a).

[0091] In some embodiments, the target sequence is a sequence selected from the group consisting of a human C1S mRNA exon, such as a human C1S mRNA intron selected from the group consisting of Ia1-Ia15 (see for example Table 1a above).

[0092] Accordingly, the invention provides an oligonucleotide, wherein said oligonucleotide comprises a contiguous sequence, which is at least 90% complementary, such as 90-95% or fully complementary, to an intron region of SEQ ID NO: 3, selected from the group consisting of Ia1-Ia15 (see Table 1a).

[0093] In some embodiments, the target sequence is SEQ ID NO: 6. In some embodiments, the contiguous nucleotide sequence as referred to herein is at least 90% (e.g., 90-95%) complementary, such as at least 95% (e.g., 95-98) complementary to a target sequence of SEQ ID NO: 6. In some embodiments, the contiguous nucleotide sequence is fully complementary to a target sequence of SEQ ID NO: 6.

[0094] The oligonucleotide of the invention comprises a contiguous nucleotide sequence, which is complementary to or hybridizes to a region on the target nucleic acid, such as a target sequence described herein.

[0095] The target nucleic acid sequence to which the oligonucleotide is complementary or hybridizes to generally comprises a stretch of contiguous nucleobases of at least 10 nucleotides. The contiguous nucleotide sequence is between 12 to 70 nucleotides, such as 12 to 50, such as 13 to such as 14 to 25, such as 15 to 21 contiguous nucleotides.

[0096] In some embodiments, the oligonucleotide of the present invention targets a region shown in Table 4a.

TABLE 4
Exemplary target regions on SEQ ID NO 3

| | start | end | | start | end | | start | end |
|---|---|---|---|---|---|---|---|---|
| Target | SEQ ID | SEQ ID | Target | SEQ ID | SEQ ID | Target | SEQ ID | SEQ ID |
| region | NO: 3 | NO: 3 | region | NO: 3 | NO: 3 | region | NO: 3 | NO: 3 |
| 1A | 607 | 634 | 501A | 21067 | 21082 | 1001A | 53904 | 53922 |
| 2A | 607 | 621 | 502A | 21069 | 21085 | 1002A | 53927 | 53943 |
| 3A | 607 | 622 | 503A | 21069 | 21092 | 1003A | 53927 | 53948 |
| 4A | 617 | 634 | 504A | 21069 | 21084 | 1004A | 53931 | 53945 |
| 5A | 652 | 669 | 505A | 21072 | 21093 | 1005A | 53975 | 53989 |
| 6A | 692 | 708 | 506A | 21079 | 21094 | 1006A | 53977 | 53993 |
| 7A | 738 | 755 | 507A | 21082 | 21097 | 1007A | 53977 | 54000 |
| 8A | 740 | 755 | 508A | 22280 | 22294 | 1008A | 53977 | 53992 |
| 9A | 741 | 755 | 509A | 22759 | 22773 | 1009A | 55045 | 55059 |
| 10A | 778 | 795 | 510A | 23030 | 23048 | 1010A | 55045 | 55060 |
| 11A | 861 | 877 | 511A | 23137 | 23158 | 1011A | 55048 | 55062 |
| 12A | 862 | 876 | 512A | 23142 | 23156 | 1012A | 55097 | 55117 |
| 13A | 1056 | 1073 | 513A | 23144 | 23158 | 1013A | 55146 | 55162 |
| 14A | 1056 | 1071 | 514A | 23326 | 23343 | 1014A | 55146 | 55161 |
| 15A | 1056 | 1070 | 515A | 23327 | 23343 | 1015A | 55146 | 55165 |
| 16A | 1057 | 1072 | 516A | 23384 | 23410 | 1016A | 55187 | 55201 |
| 17A | 1057 | 1071 | 517A | 23385 | 23404 | 1017A | 56661 | 56676 |
| 18A | 1058 | 1073 | 518A | 23385 | 23408 | 1018A | 56661 | 56678 |
| 19A | 1058 | 1072 | 519A | 23386 | 23402 | 1019A | 56662 | 56677 |
| 20A | 1059 | 1073 | 520A | 23387 | 23401 | 1020A | 56662 | 56676 |
| 21A | 1061 | 1077 | 521A | 23388 | 23405 | 1021A | 56663 | 56678 |
| 22A | 1066 | 1085 | 522A | 23389 | 23408 | 1022A | 56663 | 56677 |
| 23A | 1066 | 1080 | 523A | 23390 | 23406 | 1023A | 56664 | 56678 |
| 24A | 1066 | 1083 | 524A | 23390 | 23404 | 1024A | 56666 | 56682 |
| 25A | 1097 | 1116 | 525A | 23391 | 23407 | 1025A | 56706 | 56720 |
| 26A | 1097 | 1111 | 526A | 23391 | 23405 | 1026A | 56770 | 56784 |
| 27A | 1097 | 1114 | 527A | 23392 | 23408 | 1027A | 56772 | 56786 |
| 28A | 1097 | 1113 | 528A | 23392 | 23406 | 1028A | 56772 | 56805 |
| 29A | 1116 | 1132 | 529A | 23393 | 23409 | 1029A | 56772 | 56787 |
| 30A | 1207 | 1221 | 530A | 23393 | 23407 | 1030A | 56772 | 56790 |
| 31A | 1224 | 1249 | 531A | 23394 | 23410 | 1031A | 56772 | 56797 |
| 32A | 1224 | 1245 | 532A | 23394 | 23408 | 1032A | 56776 | 56795 |
| 33A | 1224 | 1240 | 533A | 23395 | 23409 | 1033A | 56777 | 56797 |
| 34A | 1224 | 1241 | 534A | 23396 | 23410 | 1034A | 56779 | 56797 |
| 35A | 1224 | 1242 | 535A | 26353 | 26371 | 1035A | 56781 | 56797 |
| 36A | 1227 | 1248 | 536A | 26354 | 26371 | 1036A | 56781 | 56796 |
| 37A | 1227 | 1249 | 537A | 26387 | 26404 | 1037A | 56782 | 56797 |
| 38A | 1229 | 1249 | 538A | 26549 | 26576 | 1038A | 56783 | 56797 |
| 39A | 1255 | 1272 | 539A | 26630 | 26649 | 1039A | 56785 | 56804 |
| 40A | 1257 | 1272 | 540A | 26630 | 26653 | 1040A | 56786 | 56805 |
| 41A | 1266 | 1282 | 541A | 26630 | 26656 | 1041A | 56786 | 56804 |
| 42A | 1266 | 1281 | 542A | 26631 | 26647 | 1042A | 56787 | 56804 |
| 43A | 1287 | 1302 | 543A | 26632 | 26646 | 1043A | 56787 | 56805 |
| 44A | 1290 | 1314 | 544A | 26633 | 26650 | 1044A | 56790 | 56804 |
| 45A | 1292 | 1314 | 545A | 26634 | 26653 | 1045A | 56790 | 56805 |
| 46A | 1292 | 1310 | 546A | 26635 | 26651 | 1046A | 56818 | 56834 |
| 47A | 1298 | 1313 | 547A | 26635 | 26649 | 1047A | 56818 | 56832 |
| 48A | 1302 | 1316 | 548A | 26636 | 26652 | 1048A | 56818 | 56833 |
| 49A | 1669 | 1683 | 549A | 26636 | 26650 | 1049A | 56819 | 56834 |
| 50A | 1713 | 1734 | 550A | 26637 | 26653 | 1050A | 56831 | 56847 |
| 51A | 1713 | 1733 | 551A | 26637 | 26651 | 1051A | 56831 | 56848 |
| 52A | 1716 | 1734 | 552A | 26638 | 26654 | 1052A | 56837 | 56852 |
| 53A | 1717 | 1731 | 553A | 26638 | 26652 | 1053A | 56905 | 56923 |
| 54A | 1888 | 1902 | 554A | 26639 | 26655 | 1054A | 56908 | 56923 |
| 55A | 1980 | 2008 | 555A | 26639 | 26653 | 1055A | 56911 | 56935 |
| 56A | 1980 | 1998 | 556A | 26640 | 26656 | 1056A | 56913 | 56935 |
| 57A | 1981 | 1998 | 557A | 26640 | 26654 | 1057A | 56913 | 56931 |
| 58A | 1982 | 2008 | 558A | 26641 | 26655 | 1058A | 56919 | 56934 |
| 59A | 1986 | 2000 | 559A | 26642 | 26656 | 1059A | 56923 | 56937 |
| 60A | 1987 | 2004 | 560A | 26644 | 26658 | 1060A | 58838 | 58864 |
| 61A | 1989 | 2004 | 561A | 27842 | 27856 | 1061A | 58842 | 58856 |
| 62A | 1990 | 2004 | 562A | 27844 | 27860 | 1062A | 58843 | 58860 |
| 63A | 1990 | 2005 | 563A | 27849 | 27863 | 1063A | 58845 | 58860 |
| 64A | 2010 | 2025 | 564A | 27884 | 27898 | 1064A | 58846 | 58860 |
| 65A | 2076 | 2092 | 565A | 27884 | 27901 | 1065A | 58846 | 58861 |
| 66A | 2076 | 2095 | 566A | 27884 | 27900 | 1066A | 58909 | 58927 |
| 67A | 2076 | 2094 | 567A | 27902 | 27919 | 1067A | 58910 | 58924 |
| 68A | 2079 | 2095 | 568A | 27990 | 28005 | 1068A | 59719 | 59736 |
| 69A | 2081 | 2095 | 569A | 27990 | 28004 | 1069A | 59791 | 59805 |
| 70A | 2115 | 2130 | 570A | 28020 | 28035 | 1070A | 59791 | 59807 |
| 71A | 2448 | 2465 | 571A | 28020 | 28034 | 1071A | 59855 | 59869 |
| 72A | 2550 | 2564 | 572A | 28021 | 28035 | 1072A | 59920 | 59941 |
| 73A | 2600 | 2615 | 573A | 28037 | 28054 | 1073A | 59920 | 59942 |
| 74A | 2657 | 2674 | 574A | 28112 | 28127 | 1074A | 59922 | 59942 |
| 75A | 2659 | 2673 | 575A | 28113 | 28127 | 1075A | 59992 | 60018 |
| 76A | 2660 | 2674 | 576A | 28128 | 28144 | 1076A | 59993 | 60012 |
| 77A | 3763 | 3779 | 577A | 28128 | 28145 | 1077A | 60003 | 60018 |
| 78A | 3765 | 3779 | 578A | 28128 | 28142 | 1078A | 60050 | 60075 |
| 79A | 3780 | 3796 | 579A | 28128 | 28143 | 1079A | 60050 | 60071 |
| 80A | 3908 | 3927 | 580A | 28130 | 28145 | 1080A | 60050 | 60066 |
| 81A | 3913 | 3927 | 581A | 28145 | 28162 | 1081A | 60050 | 60067 |
| 82A | 4064 | 4078 | 582A | 28145 | 28163 | 1082A | 60050 | 60068 |
| 83A | 4918 | 4944 | 583A | 28148 | 28162 | 1083A | 60053 | 60074 |
| 84A | 4919 | 4934 | 584A | 28148 | 28163 | 1084A | 60053 | 60075 |
| 85A | 4920 | 4934 | 585A | 28202 | 28230 | 1085A | 60055 | 60075 |
| 86A | 4920 | 4935 | 586A | 28208 | 28223 | 1086A | 60093 | 60108 |
| 87A | 5021 | 5035 | 587A | 28209 | 28230 | 1087A | 60094 | 60108 |
| 88A | 5113 | 5129 | 588A | 28209 | 28225 | 1088A | 60124 | 60140 |
| 89A | 5793 | 5807 | 589A | 28212 | 28230 | 1089A | 60124 | 60141 |
| 90A | 5800 | 5814 | 590A | 28271 | 28285 | 1090A | 60124 | 60138 |
| 91A | 6044 | 6058 | 591A | 31084 | 31103 | 1091A | 60124 | 60139 |
| 92A | 6075 | 6094 | 592A | 31085 | 31101 | 1092A | 60124 | 60163 |
| 93A | 6075 | 6093 | 593A | 31085 | 31099 | 1093A | 60126 | 60141 |
| 94A | 6076 | 6093 | 594A | 31086 | 31102 | 1094A | 60127 | 60154 |
| 95A | 6076 | 6094 | 595A | 31086 | 31100 | 1095A | 60127 | 60153 |
| 96A | 6079 | 6093 | 596A | 31087 | 31103 | 1096A | 60128 | 60159 |
| 97A | 6079 | 6094 | 597A | 31087 | 31101 | 1097A | 60128 | 60147 |
| 98A | 6082 | 6096 | 598A | 31088 | 31102 | 1098A | 60130 | 60159 |
| 99A | 6130 | 6146 | 599A | 31089 | 31103 | 1099A | 60136 | 60160 |
| 100A | 6170 | 6184 | 600A | 31839 | 31853 | 1100A | 60138 | 60153 |
| 101A | 6206 | 6240 | 601A | 31886 | 31901 | 1101A | 60138 | 60157 |
| 102A | 6206 | 6230 | 602A | 31903 | 31924 | 1102A | 60142 | 60156 |
| 103A | 6208 | 6223 | 603A | 31903 | 31923 | 1103A | 60142 | 60161 |
| 104A | 6208 | 6227 | 604A | 31906 | 31924 | 1104A | 60144 | 60159 |
| 105A | 6212 | 6226 | 605A | 31907 | 31921 | 1105A | 60146 | 60162 |
| 106A | 6212 | 6237 | 606A | 32135 | 32149 | 1106A | 60146 | 60161 |
| 107A | 6212 | 6239 | 607A | 32135 | 32150 | 1107A | 60460 | 60474 |
| 108A | 6212 | 6231 | 608A | 32223 | 32239 | 1108A | 60524 | 60538 |
| 109A | 6212 | 6236 | 609A | 32223 | 32242 | 1109A | 60524 | 60539 |
| 110A | 6214 | 6229 | 610A | 32223 | 32241 | 1110A | 60610 | 60625 |
| 111A | 6216 | 6232 | 611A | 32226 | 32242 | 1111A | 60645 | 60661 |
| 112A | 6216 | 6239 | 612A | 32228 | 32242 | 1112A | 60645 | 60660 |
| 113A | 6216 | 6231 | 613A | 32290 | 32304 | 1113A | 60671 | 60693 |
| 114A | 6219 | 6240 | 614A | 32832 | 32846 | 1114A | 60671 | 60689 |
| 115A | 6254 | 6268 | 615A | 32867 | 32883 | 1115A | 60675 | 60699 |
| 116A | 6863 | 6878 | 616A | 32867 | 32881 | 1116A | 60677 | 60692 |
| 117A | 6864 | 6878 | 617A | 32868 | 32882 | 1117A | 60677 | 60696 |
| 118A | 6958 | 6991 | 618A | 32869 | 32883 | 1118A | 60681 | 60695 |
| 119A | 6966 | 6983 | 619A | 32996 | 33010 | 1119A | 60681 | 60700 |
| 120A | 7043 | 7060 | 620A | 33037 | 33052 | 1120A | 60681 | 60705 |
| 121A | 7047 | 7061 | 621A | 33038 | 33052 | 1121A | 60683 | 60698 |
| 122A | 7086 | 7103 | 622A | 33098 | 33118 | 1122A | 60685 | 60701 |
| 123A | 7088 | 7103 | 623A | 33098 | 33119 | 1123A | 60685 | 60700 |
| 124A | 7089 | 7103 | 624A | 33101 | 33118 | 1124A | 61257 | 61271 |
| 125A | 7140 | 7154 | 625A | 33102 | 33118 | 1125A | 61257 | 61274 |
| 126A | 7142 | 7170 | 626A | 33401 | 33416 | 1126A | 61257 | 61273 |
| 127A | 7148 | 7169 | 627A | 33419 | 33433 | 1127A | 61382 | 61398 |
| 128A | 7148 | 7163 | 628A | 33460 | 33476 | 1128A | 61382 | 61399 |
| 129A | 7149 | 7169 | 629A | 33460 | 33477 | 1129A | 61388 | 61407 |
| 130A | 7149 | 7170 | 630A | 33466 | 33485 | 1130A | 61388 | 61403 |
| 131A | 7152 | 7169 | 631A | 33466 | 33481 | 1131A | 61395 | 61410 |
| 132A | 7153 | 7169 | 632A | 33488 | 33509 | 1132A | 61481 | 61502 |
| 133A | 7174 | 7192 | 633A | 33488 | 33508 | 1133A | 61650 | 61664 |
| 134A | 7184 | 7198 | 634A | 33503 | 33523 | 1134A | 61650 | 61667 |
| 135A | 7211 | 7230 | 635A | 33503 | 33524 | 1135A | 61751 | 61766 |
| 136A | 7212 | 7228 | 636A | 33503 | 33518 | 1136A | 61766 | 61783 |
| 137A | 7213 | 7227 | 637A | 33504 | 33518 | 1137A | 61769 | 61783 |
| 138A | 7216 | 7230 | 638A | 33506 | 33522 | 1138A | 61802 | 61817 |
| 139A | 8780 | 8795 | 639A | 33510 | 33524 | 1139A | 61802 | 61821 |
| 140A | 9029 | 9047 | 640A | 34494 | 34509 | 1140A | 61802 | 61819 |
| 141A | 9122 | 9156 | 641A | 34495 | 34509 | 1141A | 61803 | 61820 |
| 142A | 9122 | 9148 | 642A | 34510 | 34526 | 1142A | 61803 | 61818 |
| 143A | 9122 | 9136 | 643A | 34510 | 34527 | 1143A | 61803 | 61817 |
| 144A | 9124 | 9158 | 644A | 34510 | 34524 | 1144A | 61804 | 61821 |
| 145A | 9124 | 9150 | 645A | 34510 | 34525 | 1145A | 61804 | 61819 |
| 146A | 9124 | 9138 | 646A | 34512 | 34527 | 1146A | 61804 | 61818 |
| 147A | 9126 | 9160 | 647A | 34527 | 34544 | 1147A | 61805 | 61820 |
| 148A | 9126 | 9152 | 648A | 34530 | 34544 | 1148A | 61805 | 61819 |
| 149A | 9126 | 9140 | 649A | 34570 | 34586 | 1149A | 61806 | 61821 |
| 150A | 9128 | 9162 | 650A | 34570 | 34587 | 1150A | 61806 | 61820 |
| 151A | 9128 | 9154 | 651A | 34570 | 34588 | 1151A | 61807 | 61821 |
| 152A | 9128 | 9142 | 652A | 34653 | 34677 | 1152A | 61823 | 61839 |
| 153A | 9130 | 9164 | 653A | 34656 | 34671 | 1153A | 61823 | 61846 |
| 154A | 9130 | 9156 | 654A | 34659 | 34673 | 1154A | 61851 | 61865 |
| 155A | 9130 | 9144 | 655A | 34660 | 34676 | 1155A | 62171 | 62185 |
| 156A | 9132 | 9166 | 656A | 36367 | 36381 | 1156A | 65577 | 65592 |
| 157A | 9132 | 9158 | 657A | 36377 | 36394 | 1157A | 65577 | 65605 |
| 158A | 9132 | 9146 | 658A | 36494 | 36508 | 1158A | 65578 | 65605 |
| 159A | 9134 | 9168 | 659A | 36500 | 36514 | 1159A | 65578 | 65592 |
| 160A | 9134 | 9160 | 660A | 36500 | 36515 | 1160A | 65578 | 65593 |
| 161A | 9134 | 9148 | 661A | 36555 | 36569 | 1161A | 65588 | 65605 |
| 162A | 9136 | 9170 | 662A | 36604 | 36618 | 1162A | 65667 | 65683 |
| 163A | 9136 | 9162 | 663A | 37178 | 37192 | 1163A | 65669 | 65683 |
| 164A | 9136 | 9150 | 664A | 37200 | 37219 | 1164A | 65779 | 65793 |
| 165A | 9138 | 9164 | 665A | 37200 | 37214 | 1165A | 65834 | 65853 |
| 166A | 9138 | 9152 | 666A | 37200 | 37217 | 1166A | 65834 | 65857 |
| 167A | 9140 | 9166 | 667A | 37200 | 37216 | 1167A | 65834 | 65860 |
| 168A | 9140 | 9154 | 668A | 37264 | 37280 | 1168A | 65834 | 65865 |
| 169A | 9142 | 9168 | 669A | 37264 | 37281 | 1169A | 65835 | 65851 |
| 170A | 9142 | 9156 | 670A | 37264 | 37278 | 1170A | 65836 | 65850 |
| 171A | 9144 | 9170 | 671A | 37264 | 37279 | 1171A | 65837 | 65854 |
| 172A | 9144 | 9158 | 672A | 37266 | 37281 | 1172A | 65838 | 65857 |
| 173A | 9146 | 9160 | 673A | 37281 | 37298 | 1173A | 65839 | 65855 |
| 174A | 9148 | 9162 | 674A | 37284 | 37298 | 1174A | 65839 | 65853 |
| 175A | 9150 | 9164 | 675A | 37312 | 37326 | 1175A | 65840 | 65856 |
| 176A | 9152 | 9166 | 676A | 37312 | 37327 | 1176A | 65840 | 65854 |
| 177A | 9154 | 9168 | 677A | 37348 | 37366 | 1177A | 65841 | 65857 |
| 178A | 9156 | 9170 | 678A | 37378 | 37393 | 1178A | 65841 | 65855 |
| 179A | 9181 | 9195 | 679A | 37396 | 37410 | 1179A | 65842 | 65858 |
| 180A | 9201 | 9220 | 680A | 37398 | 37412 | 1180A | 65842 | 65856 |
| 181A | 9201 | 9215 | 681A | 37398 | 37413 | 1181A | 65843 | 65859 |
| 182A | 9201 | 9218 | 682A | 37413 | 37427 | 1182A | 65843 | 65857 |
| 183A | 9201 | 9217 | 683A | 37478 | 37492 | 1183A | 65844 | 65860 |
| 184A | 9265 | 9281 | 684A | 37478 | 37493 | 1184A | 65844 | 65858 |
| 185A | 9265 | 9279 | 685A | 37482 | 37496 | 1185A | 65845 | 65861 |
| 186A | 9265 | 9280 | 686A | 37482 | 37497 | 1186A | 65845 | 65859 |
| 187A | 9331 | 9345 | 687A | 37486 | 37500 | 1187A | 65846 | 65862 |
| 188A | 9333 | 9349 | 688A | 37498 | 37520 | 1188A | 65846 | 65860 |
| 189A | 9333 | 9355 | 689A | 37505 | 37520 | 1189A | 65847 | 65863 |
| 190A | 9333 | 9352 | 690A | 37602 | 37622 | 1190A | 65847 | 65861 |
| 191A | 9390 | 9404 | 691A | 37604 | 37622 | 1191A | 65848 | 65864 |
| 192A | 9418 | 9437 | 692A | 37606 | 37622 | 1192A | 65848 | 65862 |
| 193A | 9422 | 9437 | 693A | 37606 | 37621 | 1193A | 65849 | 65865 |
| 194A | 9423 | 9437 | 694A | 37607 | 37622 | 1194A | 65849 | 65863 |
| 195A | 9438 | 9454 | 695A | 37608 | 37622 | 1195A | 65850 | 65864 |
| 196A | 9438 | 9455 | 696A | 37643 | 37657 | 1196A | 65851 | 65865 |
| 197A | 9438 | 9452 | 697A | 37657 | 37673 | 1197A | 66409 | 66426 |
| 198A | 9438 | 9453 | 698A | 37657 | 37674 | 1198A | 66506 | 66525 |
| 199A | 9440 | 9455 | 699A | 37663 | 37682 | 1199A | 66507 | 66525 |
| 200A | 9455 | 9472 | 700A | 37663 | 37686 | 1200A | 66508 | 66525 |
| 201A | 9458 | 9472 | 701A | 37663 | 37678 | 1201A | 66511 | 66525 |
| 202A | 9498 | 9519 | 702A | 37667 | 37683 | 1202A | 66513 | 66528 |
| 203A | 9498 | 9514 | 703A | 37693 | 37717 | 1203A | 66594 | 66609 |
| 204A | 9498 | 9515 | 704A | 37700 | 37717 | 1204A | 66595 | 66609 |
| 205A | 9498 | 9516 | 705A | 37702 | 37717 | 1205A | 66602 | 66616 |
| 206A | 9525 | 9546 | 706A | 37711 | 37727 | 1206A | 66602 | 66617 |
| 207A | 9526 | 9546 | 707A | 37711 | 37726 | 1207A | 66631 | 66660 |
| 208A | 9548 | 9562 | 708A | 37711 | 37730 | 1208A | 66639 | 66654 |
| 209A | 9548 | 9569 | 709A | 37747 | 37763 | 1209A | 66639 | 66658 |
| 210A | 9549 | 9569 | 710A | 38477 | 38491 | 1210A | 66643 | 66657 |
| 211A | 9552 | 9569 | 711A | 38893 | 38908 | 1211A | 66645 | 66660 |
| 212A | 9554 | 9569 | 712A | 38893 | 38907 | 1212A | 67638 | 67652 |
| 213A | 9584 | 9608 | 713A | 38894 | 38908 | 1213A | 67638 | 67654 |
| 214A | 9586 | 9601 | 714A | 38896 | 38912 | 1214A | 67699 | 67715 |
| 215A | 9586 | 9605 | 715A | 38896 | 38918 | 1215A | 67699 | 67725 |
| 216A | 9590 | 9604 | 716A | 38896 | 38915 | 1216A | 67701 | 67725 |
| 217A | 9592 | 9607 | 717A | 38955 | 38971 | 1217A | 67702 | 67716 |
| 218A | 9641 | 9657 | 718A | 38955 | 38972 | 1218A | 67708 | 67727 |
| 219A | 9660 | 9681 | 719A | 39006 | 39025 | 1219A | 67709 | 67729 |
| 220A | 9660 | 9676 | 720A | 39063 | 39084 | 1220A | 67711 | 67729 |
| 221A | 9663 | 9681 | 721A | 39088 | 39108 | 1221A | 67713 | 67729 |
| 222A | 9678 | 9692 | 722A | 39110 | 39124 | 1222A | 67713 | 67728 |
| 223A | 9706 | 9728 | 723A | 39110 | 39131 | 1223A | 67714 | 67729 |
| 224A | 9706 | 9721 | 724A | 39111 | 39131 | 1224A | 67715 | 67729 |
| 225A | 9714 | 9728 | 725A | 39114 | 39131 | 1225A | 68632 | 68646 |
| 226A | 9880 | 9894 | 726A | 39116 | 39131 | 1226A | 68632 | 68648 |
| 227A | 11657 | 11671 | 727A | 39137 | 39152 | 1227A | 68705 | 68723 |
| 228A | 11657 | 11679 | 728A | 39137 | 39156 | 1228A | 68707 | 68723 |
| 229A | 11657 | 11672 | 729A | 39142 | 39156 | 1229A | 68707 | 68722 |
| 230A | 11658 | 11673 | 730A | 39154 | 39171 | 1230A | 68708 | 68723 |
| 231A | 11658 | 11677 | 731A | 39157 | 39171 | 1231A | 68709 | 68723 |
| 232A | 11658 | 11675 | 732A | 39308 | 39324 | 1232A | 68800 | 68815 |
| 233A | 11659 | 11676 | 733A | 39313 | 39327 | 1233A | 68801 | 68815 |
| 234A | 11659 | 11674 | 734A | 39461 | 39477 | 1234A | 68845 | 68860 |
| 235A | 11659 | 11673 | 735A | 39575 | 39590 | 1235A | 68845 | 68864 |
| 236A | 11660 | 11677 | 736A | 39576 | 39590 | 1236A | 68849 | 68863 |
| 237A | 11660 | 11675 | 737A | 39889 | 39904 | 1237A | 68995 | 69017 |
| 238A | 11660 | 11674 | 738A | 39890 | 39904 | 1238A | 68999 | 69018 |
| 239A | 11661 | 11678 | 739A | 39892 | 39908 | 1239A | 69000 | 69020 |
| 240A | 11661 | 11676 | 740A | 39892 | 39911 | 1240A | 69002 | 69020 |
| 241A | 11661 | 11675 | 741A | 39932 | 39946 | 1241A | 69004 | 69020 |
| 242A | 11662 | 11679 | 742A | 39932 | 39949 | 1242A | 69004 | 69019 |
| 243A | 11662 | 11677 | 743A | 39932 | 39948 | 1243A | 69005 | 69020 |
| 244A | 11662 | 11676 | 744A | 39997 | 40011 | 1244A | 69006 | 69020 |
| 245A | 11663 | 11678 | 745A | 39997 | 40012 | 1245A | 69134 | 69151 |
| 246A | 11663 | 11677 | 746A | 39997 | 40015 | 1246A | 69137 | 69151 |
| 247A | 11664 | 11679 | 747A | 40056 | 40072 | 1247A | 71536 | 71550 |
| 248A | 11664 | 11678 | 748A | 40056 | 40073 | 1248A | 71536 | 71553 |
| 249A | 11665 | 11679 | 749A | 40062 | 40081 | 1249A | 71536 | 71552 |
| 250A | 11667 | 11683 | 750A | 40062 | 40085 | 1250A | 71592 | 71618 |
| 251A | 11672 | 11691 | 751A | 40062 | 40087 | 1251A | 71593 | 71607 |
| 252A | 11672 | 11686 | 752A | 40062 | 40077 | 1252A | 71593 | 71608 |
| 253A | 11672 | 11689 | 753A | 40066 | 40082 | 1253A | 71593 | 71611 |
| 254A | 11771 | 11787 | 754A | 40102 | 40118 | 1254A | 71593 | 71618 |
| 255A | 11771 | 11788 | 755A | 40136 | 40158 | 1255A | 71597 | 71616 |
| 256A | 11771 | 11785 | 756A | 40136 | 40154 | 1256A | 71598 | 71618 |
| 257A | 11771 | 11786 | 757A | 40140 | 40164 | 1257A | 71600 | 71618 |
| 258A | 11773 | 11788 | 758A | 40142 | 40157 | 1258A | 71602 | 71618 |
| 259A | 11819 | 11835 | 759A | 40142 | 40161 | 1259A | 71602 | 71617 |
| 260A | 11819 | 11833 | 760A | 40146 | 40160 | 1260A | 71603 | 71618 |
| 261A | 11819 | 11834 | 761A | 40146 | 40171 | 1261A | 71604 | 71618 |
| 262A | 11820 | 11835 | 762A | 40146 | 40173 | 1262A | 72495 | 72539 |
| 263A | 11832 | 11848 | 763A | 40146 | 40165 | 1263A | 72549 | 72575 |
| 264A | 11832 | 11849 | 764A | 40146 | 40170 | 1264A | 72594 | 72608 |
| 265A | 11838 | 11868 | 765A | 40148 | 40163 | 1265A | 72610 | 72662 |
| 266A | 11838 | 11867 | 766A | 40150 | 40166 | 1266A | 72688 | 72702 |
| 267A | 11838 | 11857 | 767A | 40150 | 40173 | 1267A | 72704 | 72722 |
| 268A | 11838 | 11861 | 768A | 40150 | 40165 | 1268A | 72730 | 72751 |
| 269A | 11838 | 11863 | 769A | 40168 | 40182 | 1269A | 72753 | 72836 |
| 270A | 11838 | 11853 | 770A | 40691 | 40706 | 1270A | 72845 | 72868 |
| 271A | 11842 | 11858 | 771A | 40691 | 40710 | 1271A | 72915 | 72937 |
| 272A | 11842 | 11865 | 772A | 40691 | 40714 | 1272A | 72939 | 72981 |
| 273A | 11851 | 11866 | 773A | 40691 | 40708 | 1273A | 72997 | 73046 |
| 274A | 11852 | 11868 | 774A | 40692 | 40709 | 1274A | 73048 | 73076 |
| 275A | 11859 | 11880 | 775A | 40692 | 40707 | 1275A | 73080 | 73100 |
| 276A | 11859 | 11881 | 776A | 40692 | 40706 | 1276A | 73759 | 73785 |
| 277A | 11860 | 11881 | 777A | 40692 | 40714 | 1277A | 73761 | 73782 |
| 278A | 11860 | 11880 | 778A | 40693 | 40710 | 1278A | 73766 | 73780 |
| 279A | 11875 | 11895 | 779A | 40693 | 40708 | 1279A | 73768 | 73782 |
| 280A | 11875 | 11890 | 780A | 40693 | 40707 | 1280A | 73770 | 73785 |
| 281A | 11876 | 11890 | 781A | 40693 | 40715 | 1281A | 73810 | 73830 |
| 282A | 11878 | 11894 | 782A | 40694 | 40711 | 1282A | 73814 | 73828 |
| 283A | 11917 | 11950 | 783A | 40694 | 40709 | 1283A | 73850 | 73866 |
| 284A | 11917 | 11941 | 784A | 40694 | 40708 | 1284A | 73851 | 73865 |
| 285A | 11920 | 11935 | 785A | 40695 | 40712 | 1285A | 74006 | 74027 |
| 286A | 11923 | 11937 | 786A | 40695 | 40710 | 1286A | 74006 | 74028 |
| 287A | 11924 | 11940 | 787A | 40695 | 40709 | 1287A | 74008 | 74027 |
| 288A | 11938 | 11953 | 788A | 40696 | 40713 | 1288A | 74009 | 74025 |
| 289A | 11941 | 11956 | 789A | 40696 | 40711 | 1289A | 74010 | 74024 |
| 290A | 12157 | 12173 | 790A | 40696 | 40710 | 1290A | 74011 | 74028 |
| 291A | 12159 | 12173 | 791A | 40697 | 40714 | 1291A | 74013 | 74027 |
| 292A | 12270 | 12285 | 792A | 40697 | 40712 | 1292A | 74014 | 74028 |
| 293A | 12270 | 12284 | 793A | 40697 | 40711 | 1293A | 74084 | 74099 |
| 294A | 12325 | 12344 | 794A | 40698 | 40715 | 1294A | 74110 | 74138 |
| 295A | 12325 | 12348 | 795A | 40698 | 40713 | 1295A | 74159 | 74175 |
| 296A | 12326 | 12342 | 796A | 40698 | 40712 | 1296A | 74208 | 74234 |
| 297A | 12327 | 12341 | 797A | 40699 | 40714 | 1297A | 74236 | 74306 |
| 298A | 12328 | 12345 | 798A | 40699 | 40713 | 1298A | 74308 | 74331 |
| 299A | 12329 | 12348 | 799A | 40700 | 40715 | 1299A | 74333 | 74387 |
| 300A | 12330 | 12346 | 800A | 40700 | 40714 | 1300A | 74389 | 74417 |
| 301A | 12330 | 12344 | 801A | 40701 | 40715 | 1301A | 74419 | 74453 |
| 302A | 12331 | 12347 | 802A | 40703 | 40719 | 1302A | 74477 | 74498 |
| 303A | 12331 | 12345 | 803A | 40708 | 40727 | 1303A | 74500 | 74523 |
| 304A | 12332 | 12348 | 804A | 40708 | 40722 | 1304A | 74539 | 74553 |
| 305A | 12332 | 12346 | 805A | 40708 | 40725 | 1305A | 74555 | 74570 |
| 306A | 12333 | 12347 | 806A | 40717 | 40731 | 1306A | 74576 | 74604 |
| 307A | 12334 | 12348 | 807A | 40869 | 40886 | 1307A | 74617 | 74636 |
| 308A | 12512 | 12529 | 808A | 40869 | 40884 | 1308A | 74649 | 74677 |
| 309A | 12513 | 12529 | 809A | 40869 | 40883 | 1309A | 74679 | 74801 |
| 310A | 12558 | 12572 | 810A | 40869 | 40891 | 1310A | 74803 | 74861 |
| 311A | 12560 | 12574 | 811A | 40870 | 40887 | 1311A | 74863 | 74884 |
| 312A | 12606 | 12620 | 812A | 40870 | 40885 | 1312A | 74886 | 74903 |
| 313A | 12666 | 12681 | 813A | 40870 | 40884 | 1313A | 74916 | 74940 |
| 314A | 12675 | 12690 | 814A | 40870 | 40892 | 1314A | 74942 | 74958 |
| 315A | 12696 | 12723 | 815A | 40871 | 40888 | 1315A | 74960 | 75001 |
| 316A | 12696 | 12722 | 816A | 40871 | 40886 | 1316A | 74962 | 74976 |
| 317A | 12697 | 12716 | 817A | 40871 | 40885 | 1317A | 75003 | 75018 |
| 318A | 12707 | 12722 | 818A | 40871 | 40893 | 1318A | 75041 | 75067 |
| 319A | 12710 | 12724 | 819A | 40872 | 40889 | 1319A | 75077 | 75104 |
| 320A | 12711 | 12727 | 820A | 40872 | 40887 | 1320A | 75131 | 75161 |
| 321A | 14491 | 14522 | 821A | 40872 | 40886 | 1321A | 75164 | 75185 |
| 322A | 14491 | 14505 | 822A | 40872 | 40894 | 1322A | 75200 | 75276 |
| 323A | 14491 | 14506 | 823A | 40873 | 40890 | 1323A | 75278 | 75331 |
| 324A | 14507 | 14521 | 824A | 40873 | 40888 | 1324A | 75333 | 75391 |
| 325A | 14578 | 14595 | 825A | 40873 | 40887 | 1325A | 75393 | 75409 |
| 326A | 14582 | 14596 | 826A | 40873 | 40895 | 1326A | 75436 | 75479 |
| 327A | 14624 | 14638 | 827A | 40874 | 40891 | 1327A | 75506 | 75537 |
| 328A | 14684 | 14704 | 828A | 40874 | 40889 | 1328A | 75516 | 75537 |
| 329A | 14687 | 14704 | 829A | 40874 | 40888 | 1329A | 75521 | 75535 |
| 330A | 14688 | 14704 | 830A | 40874 | 40896 | 1330A | 75523 | 75537 |
| 331A | 14736 | 14750 | 831A | 40875 | 40892 | 1331A | 75593 | 75609 |
| 332A | 15102 | 15117 | 832A | 40875 | 40890 | 1332A | 75593 | 75611 |
| 333A | 15102 | 15116 | 833A | 40875 | 40889 | 1333A | 75613 | 75630 |
| 334A | 15103 | 15117 | 834A | 40876 | 40893 | 1334A | 75642 | 75657 |
| 335A | 15403 | 15430 | 835A | 40876 | 40891 | 1335A | 75708 | 75723 |
| 336A | 15403 | 15417 | 836A | 40876 | 40890 | 1336A | 75739 | 75775 |
| 337A | 15403 | 15418 | 837A | 40877 | 40894 | 1337A | 75808 | 75826 |
| 338A | 15413 | 15430 | 838A | 40877 | 40892 | 1338A | 75840 | 75858 |
| 339A | 15442 | 15457 | 839A | 40877 | 40891 | 1339A | 75894 | 75915 |
| 340A | 15555 | 15569 | 840A | 40878 | 40895 | 1340A | 75961 | 75993 |
| 341A | 15666 | 15685 | 841A | 40878 | 40893 | 1341A | 75995 | 76038 |
| 342A | 15666 | 15689 | 842A | 40878 | 40892 | 1342A | 76070 | 76095 |
| 343A | 15666 | 15692 | 843A | 40879 | 40896 | 1343A | 76104 | 76129 |
| 344A | 15667 | 15683 | 844A | 40879 | 40894 | 1344A | 76131 | 76181 |
| 345A | 15668 | 15682 | 845A | 40879 | 40893 | 1345A | 76192 | 76231 |
| 346A | 15669 | 15686 | 846A | 40880 | 40895 | 1346A | 76233 | 76247 |
| 347A | 15670 | 15689 | 847A | 40880 | 40894 | 1347A | 76248 | 76262 |
| 348A | 15671 | 15687 | 848A | 40881 | 40896 | 1348A | 76268 | 76292 |
| 349A | 15671 | 15685 | 849A | 40881 | 40895 | 1349A | 76294 | 76321 |
| 350A | 15672 | 15688 | 850A | 40882 | 40896 | 1350A | 76321 | 76344 |
| 351A | 15672 | 15686 | 851A | 40893 | 40912 | 1351A | 76346 | 76369 |
| 352A | 15673 | 15689 | 852A | 40893 | 40908 | 1352A | 76390 | 76405 |
| 353A | 15673 | 15687 | 853A | 40900 | 40915 | 1353A | 76455 | 76474 |
| 354A | 15674 | 15690 | 854A | 40930 | 40945 | 1354A | 76476 | 76528 |
| 355A | 15674 | 15688 | 855A | 40931 | 40945 | 1355A | 76527 | 76543 |
| 356A | 15675 | 15691 | 856A | 40975 | 40990 | 1356A | 76545 | 76566 |
| 357A | 15675 | 15689 | 857A | 41049 | 41063 | 1357A | 76592 | 76617 |
| 358A | 15676 | 15692 | 858A | 41049 | 41064 | 1358A | 76617 | 76636 |
| 359A | 15676 | 15690 | 859A | 41053 | 41067 | 1359A | 76638 | 76657 |
| 360A | 15677 | 15691 | 860A | 41053 | 41068 | 1360A | 76702 | 76718 |
| 361A | 15678 | 15692 | 861A | 41057 | 41071 | 1361A | 76747 | 76797 |
| 362A | 18072 | 18086 | 862A | 41057 | 41072 | 1362A | 76805 | 76825 |
| 363A | 18072 | 18105 | 863A | 41116 | 41130 | 1363A | 76838 | 76908 |
| 364A | 18072 | 18087 | 864A | 41116 | 41133 | 1364A | 76910 | 76944 |
| 365A | 18072 | 18090 | 865A | 41116 | 41132 | 1365A | 76947 | 76974 |
| 366A | 18072 | 18097 | 866A | 41180 | 41196 | 1366A | 76977 | 77002 |
| 367A | 18076 | 18095 | 867A | 41180 | 41197 | 1367A | 77017 | 77049 |
| 368A | 18077 | 18097 | 868A | 41180 | 41194 | 1368A | 77051 | 77066 |
| 369A | 18079 | 18097 | 869A | 41180 | 41195 | 1369A | 77084 | 77106 |
| 370A | 18081 | 18097 | 870A | 41182 | 41197 | 1370A | 77135 | 77162 |
| 371A | 18081 | 18096 | 871A | 41220 | 41235 | 1371A | 77143 | 77162 |
| 372A | 18082 | 18097 | 872A | 41220 | 41234 | 1372A | 77143 | 77157 |
| 373A | 18083 | 18097 | 873A | 41220 | 41239 | 1373A | 77143 | 77160 |
| 374A | 18085 | 18104 | 874A | 41225 | 41239 | 1374A | 77143 | 77159 |
| 375A | 18086 | 18105 | 875A | 41238 | 41253 | 1375A | 77168 | 77184 |
| 376A | 18086 | 18104 | 876A | 41238 | 41252 | 1376A | 77206 | 77230 |
| 377A | 18087 | 18104 | 877A | 41239 | 41253 | 1377A | 77207 | 77221 |
| 378A | 18087 | 18105 | 878A | 41288 | 41312 | 1378A | 77213 | 77232 |
| 379A | 18090 | 18104 | 879A | 41295 | 41312 | 1379A | 77218 | 77233 |
| 380A | 18090 | 18105 | 880A | 41297 | 41312 | 1380A | 77287 | 77323 |
| 381A | 18093 | 18107 | 881A | 41324 | 41354 | 1381A | 77295 | 77310 |
| 382A | 18131 | 18147 | 882A | 41330 | 41354 | 1382A | 77341 | 77390 |
| 383A | 18131 | 18148 | 883A | 41332 | 41354 | 1383A | 77356 | 77386 |
| 384A | 18137 | 18166 | 884A | 41332 | 41350 | 1384A | 77362 | 77386 |
| 385A | 18137 | 18156 | 885A | 41336 | 41370 | 1385A | 77364 | 77386 |
| 386A | 18137 | 18160 | 886A | 41336 | 41360 | 1386A | 77364 | 77382 |
| 387A | 18137 | 18162 | 887A | 41338 | 41353 | 1387A | 77370 | 77385 |
| 388A | 18137 | 18152 | 888A | 41338 | 41357 | 1388A | 77373 | 77387 |
| 389A | 18141 | 18157 | 889A | 41342 | 41356 | 1389A | 77374 | 77390 |
| 390A | 18141 | 18164 | 890A | 41342 | 41367 | 1390A | 77392 | 77449 |
| 391A | 18150 | 18165 | 891A | 41342 | 41371 | 1391A | 77447 | 77469 |
| 392A | 18213 | 18235 | 892A | 41342 | 41369 | 1392A | 77501 | 77515 |
| 393A | 18213 | 18231 | 893A | 41342 | 41361 | 1393A | 77517 | 77551 |
| 394A | 18217 | 18241 | 894A | 41342 | 41366 | 1394A | 77553 | 77574 |
| 395A | 18219 | 18234 | 895A | 41344 | 41359 | 1395A | 77576 | 77593 |
| 396A | 18219 | 18238 | 896A | 41346 | 41362 | 1396A | 77600 | 77614 |
| 397A | 18223 | 18237 | 897A | 41346 | 41369 | 1397A | 77616 | 77680 |
| 398A | 18223 | 18248 | 898A | 41346 | 41361 | 1398A | 77682 | 77701 |
| 399A | 18223 | 18242 | 899A | 41349 | 41370 | 1399A | 77703 | 77721 |
| 400A | 18223 | 18247 | 900A | 41356 | 41371 | 1400A | 77731 | 77799 |
| 401A | 18225 | 18240 | 901A | 41672 | 41686 | 1401A | 77808 | 77826 |
| 402A | 18227 | 18243 | 902A | 41672 | 41687 | 1402A | 77842 | 77873 |
| 403A | 18227 | 18242 | 903A | 41761 | 41778 | 1403A | 77905 | 77931 |
| 404A | 18849 | 18866 | 904A | 41765 | 41779 | 1404A | 77945 | 77973 |
| 405A | 18849 | 18867 | 905A | 41803 | 41820 | 1405A | 77996 | 78018 |
| 406A | 18850 | 18866 | 906A | 41805 | 41820 | 1406A | 78043 | 78069 |
| 407A | 18850 | 18867 | 907A | 41806 | 41820 | 1407A | 78085 | 78126 |
| 408A | 18879 | 18894 | 908A | 41927 | 41948 | 1408A | 78128 | 78150 |
| 409A | 18880 | 18894 | 909A | 41929 | 41948 | 1409A | 78167 | 78226 |
| 410A | 18895 | 18911 | 910A | 41930 | 41946 | 1410A | 78244 | 78269 |
| 411A | 18895 | 18912 | 911A | 41931 | 41945 | 1411A | 78291 | 78308 |
| 412A | 18895 | 18909 | 912A | 41934 | 41948 | 1412A | 78325 | 78339 |
| 413A | 18895 | 18910 | 913A | 45522 | 45541 | 1413A | 78342 | 78367 |
| 414A | 18897 | 18912 | 914A | 45876 | 45891 | 1414A | 78404 | 78428 |
| 415A | 18968 | 18988 | 915A | 48897 | 48911 | 1415A | 78430 | 78454 |
| 416A | 19014 | 19034 | 916A | 51646 | 51661 | 1416A | 78463 | 78482 |
| 417A | 19017 | 19034 | 917A | 51750 | 51764 | 1417A | 78484 | 78499 |
| 418A | 19019 | 19034 | 918A | 51811 | 51828 | 1418A | 78501 | 78542 |
| 419A | 19051 | 19077 | 919A | 51812 | 51828 | 1419A | 78544 | 78567 |
| 420A | 19051 | 19066 | 920A | 51857 | 51871 | 1420A | 78561 | 78583 |
| 421A | 19051 | 19070 | 921A | 51859 | 51873 | 1421A | 78585 | 78610 |
| 422A | 19055 | 19069 | 922A | 51859 | 51874 | 1422A | 78630 | 78644 |
| 423A | 19057 | 19074 | 923A | 51859 | 51877 | 1423A | 78659 | 78862 |
| 424A | 19060 | 19074 | 924A | 51859 | 51884 | 1424A | 78864 | 78925 |
| 425A | 19235 | 19250 | 925A | 51863 | 51882 | 1425A | 78927 | 78941 |
| 426A | 19235 | 19254 | 926A | 51864 | 51884 | 1426A | 78935 | 78958 |
| 427A | 19235 | 19252 | 927A | 51866 | 51884 | 1427A | 78960 | 79000 |
| 428A | 19236 | 19253 | 928A | 51868 | 51884 | 1428A | 79030 | 79051 |
| 429A | 19236 | 19251 | 929A | 51868 | 51883 | 1429A | 79053 | 79092 |
| 430A | 19236 | 19250 | 930A | 51869 | 51884 | 1430A | 79103 | 79131 |
| 431A | 19237 | 19254 | 931A | 51870 | 51884 | 1431A | 79143 | 79173 |
| 432A | 19237 | 19252 | 932A | 51920 | 51945 | 1432A | 79220 | 79314 |
| 433A | 19237 | 19251 | 933A | 51920 | 51941 | 1433A | 79316 | 79330 |
| 434A | 19238 | 19253 | 934A | 51920 | 51936 | 1434A | 79332 | 79462 |
| 435A | 19238 | 19252 | 935A | 51920 | 51937 | 1435A | 79470 | 79484 |
| 436A | 19239 | 19254 | 936A | 51920 | 51938 | 1436A | 79486 | 79509 |
| 437A | 19239 | 19253 | 937A | 51923 | 51944 | 1437A | 79512 | 79533 |
| 438A | 19240 | 19254 | 938A | 51923 | 51945 | 1438A | 79540 | 79565 |
| 439A | 19242 | 19258 | 939A | 51925 | 51945 | 1439A | 79602 | 79628 |
| 440A | 19300 | 19317 | 940A | 51974 | 51989 | 1440A | 79704 | 79725 |
| 441A | 19300 | 19318 | 941A | 51984 | 51999 | 1441A | 79771 | 79789 |
| 442A | 19301 | 19317 | 942A | 51987 | 52010 | 1442A | 79791 | 79808 |
| 443A | 19301 | 19318 | 943A | 51992 | 52010 | 1443A | 79849 | 79870 |
| 444A | 19346 | 19360 | 944A | 51995 | 52010 | 1444A | 79898 | 79912 |
| 445A | 19346 | 19361 | 945A | 51998 | 52022 | 1445A | 79914 | 79934 |
| 446A | 19362 | 19380 | 946A | 52000 | 52022 | 1446A | 79961 | 80004 |
| 447A | 19363 | 19380 | 947A | 52000 | 52018 | 1447A | 80002 | 80051 |
| 448A | 19366 | 19380 | 948A | 52004 | 52028 | 1448A | 80046 | 80086 |
| 449A | 19368 | 19384 | 949A | 52006 | 52021 | 1449A | 80151 | 80172 |
| 450A | 19368 | 19383 | 950A | 52006 | 52025 | 1450A | 80174 | 80199 |
| 451A | 19407 | 19432 | 951A | 52010 | 52024 | 1451A | 80221 | 80239 |
| 452A | 19407 | 19428 | 952A | 52010 | 52029 | 1452A | 80251 | 80283 |
| 453A | 19407 | 19423 | 953A | 52012 | 52027 | 1453A | 80318 | 80339 |
| 454A | 19407 | 19424 | 954A | 52014 | 52029 | 1454A | 80348 | 80372 |
| 455A | 19407 | 19425 | 955A | 52106 | 52122 | 1455A | 80374 | 80406 |
| 456A | 19410 | 19431 | 956A | 52151 | 52167 | 1456A | 80408 | 80424 |
| 457A | 19410 | 19432 | 957A | 52151 | 52168 | 1457A | 80433 | 80450 |
| 458A | 19412 | 19432 | 958A | 52151 | 52165 | 1458A | 80489 | 80527 |
| 459A | 19427 | 19443 | 959A | 52151 | 52166 | 1459A | 80529 | 80574 |
| 460A | 19461 | 19478 | 960A | 52151 | 52190 | 1460A | 80615 | 80639 |
| 461A | 19463 | 19478 | 961A | 52153 | 52168 | 1461A | 80648 | 80666 |
| 462A | 19481 | 19495 | 962A | 52154 | 52181 | 1462A | 80689 | 80703 |
| 463A | 19485 | 19516 | 963A | 52154 | 52180 | 1463A | 80716 | 80735 |
| 464A | 19485 | 19504 | 964A | 52155 | 52186 | 1464A | 80774 | 80788 |
| 465A | 19487 | 19516 | 965A | 52155 | 52174 | 1465A | 80891 | 80912 |
| 466A | 19495 | 19510 | 966A | 52157 | 52186 | 1466A | 80933 | 80967 |
| 467A | 19495 | 19514 | 967A | 52163 | 52187 | 1467A | 80982 | 81055 |
| 468A | 19499 | 19513 | 968A | 52165 | 52180 | 1468A | 81057 | 81096 |
| 469A | 19501 | 19516 | 969A | 52165 | 52184 | 1469A | 81098 | 81146 |
| 470A | 20367 | 20381 | 970A | 52169 | 52183 | 1470A | 81148 | 81185 |
| 471A | 20426 | 20447 | 971A | 52169 | 52188 | 1471A | 81191 | 81207 |
| 472A | 20426 | 20441 | 972A | 52171 | 52186 | 1472A | 81209 | 81238 |
| 473A | 20427 | 20447 | 973A | 52173 | 52189 | 1473A | 81258 | 81277 |
| 474A | 20430 | 20447 | 974A | 52173 | 52188 | 1474A | 81281 | 81296 |
| 475A | 20431 | 20447 | 975A | 52212 | 52226 | 1475A | 81334 | 81369 |
| 476A | 20462 | 20476 | 976A | 52212 | 52227 | 1476A | 81400 | 81419 |
| 477A | 20993 | 21014 | 977A | 53756 | 53770 | 1477A | 81439 | 81455 |
| 478A | 20993 | 21009 | 978A | 53836 | 53855 | 1478A | 81457 | 81472 |
| 479A | 20996 | 21014 | 979A | 53836 | 53854 | 1479A | 81480 | 81495 |
| 480A | 21024 | 21044 | 980A | 53837 | 53854 | 1480A | 81497 | 81515 |
| 481A | 21024 | 21054 | 981A | 53837 | 53855 | 1481A | 81523 | 81552 |
| 482A | 21027 | 21044 | 982A | 53840 | 53854 | 1482A | 81585 | 81616 |
| 483A | 21029 | 21044 | 983A | 53840 | 53855 | 1483A | 81618 | 81645 |
| 484A | 21039 | 21054 | 984A | 53843 | 53857 | 1484A | 81653 | 81699 |
| 485A | 21042 | 21065 | 985A | 53869 | 53884 | 1485A | 81701 | 81721 |
| 486A | 21047 | 21065 | 986A | 53881 | 53897 | 1486A | 81723 | 81744 |
| 487A | 21050 | 21065 | 987A | 53881 | 53898 | 1487A | 81746 | 81766 |
| 488A | 21053 | 21077 | 988A | 53887 | 53917 | 1488A | 81769 | 81834 |
| 489A | 21055 | 21077 | 989A | 53887 | 53916 | 1489A | 81851 | 81890 |
| 490A | 21055 | 21073 | 990A | 53887 | 53906 | 1490A | 81899 | 81926 |
| 491A | 21059 | 21093 | 991A | 53887 | 53910 | 1491A | 81939 | 81956 |
| 492A | 21059 | 21083 | 992A | 53887 | 53912 | 1492A | 81965 | 81990 |
| 493A | 21061 | 21076 | 993A | 53887 | 53922 | 1493A | 81992 | 82027 |
| 494A | 21061 | 21080 | 994A | 53887 | 53902 | 1494A | 82029 | 82059 |
| 495A | 21065 | 21079 | 995A | 53891 | 53907 | 1495A | 82076 | 82107 |
| 496A | 21065 | 21090 | 996A | 53891 | 53914 | 1496A | 82114 | 82128 |
| 497A | 21065 | 21094 | 997A | 53894 | 53922 | 1497A | 82150 | 82258 |
| 498A | 21065 | 21092 | 998A | 53900 | 53915 | 1498A | 82273 | 82330 |
| 499A | 21065 | 21084 | 999A | 53901 | 53922 | 1499A | 82332 | 82382 |
| 500A | 21065 | 21089 | 1000A | 53901 | 53917 | | | |

[0097] Target Cell

[0098] The term “target cell” as used herein refers to a cell expressing the target nucleic acid. For the therapeutic use of the present invention, it is advantageous if the target cell is a brain cell. In some embodiments, the brain cell is selected from the group consisting of a neuron and a microglia cell. In some embodiments, the target cell may be in vivo or in vitro. In some embodiments, the target cell is a mammalian cell such as a rodent cell, such as a mouse cell or a rat cell, or a woodchuck cell, or a primate cell such as a monkey cell (e.g. a cynomolgus monkey cell) or a human cell.

[0099] In some embodiments, the target cell expresses C1S mRNA, such as the C1S pre-mRNA or C1S mature mRNA. The poly A tail of the C1S mRNA is typically disregarded for antisense oligonucleotide targeting.

[0100] Naturally Occurring Variant

[0101] The term “naturally occurring variant” refers to variants of the C1S gene or transcripts which originate from the same genetic loci as the target nucleic acid, but may differ, for example, by virtue of degeneracy of the genetic code causing a multiplicity of codons encoding the same amino acid, or due to alternative splicing of pre-mRNA, or the presence of polymorphisms, such as single nucleotide polymorphisms (SNPs), and allelic variants. Based on the presence of the sufficiently complementary sequence of the oligonucleotide, the oligonucleotide of the invention may therefore target the target nucleic acid and naturally occurring variants thereof.

[0102] In some embodiments, the naturally occurring variants have at least 95% (e.g., 95-98%), such as at least 98% (e.g., 99-99%), or at least 99% (e.g., 99-100%) homology to a mammalian C1S target nucleic acid, such as a target nucleic acid of SEQ ID NO: 3 and/or SEQ ID NO: 4. In some embodiments, the naturally occurring variants have at least 99% (e.g., 99-100%) homology to the human C1S target nucleic acid of SEQ ID NO: 3. In some embodiments, the naturally occurring variants have at least 95% (e.g., 95-98%), such as at least 98% (e.g., 98-99%), or at least 99% (e.g., 99-100%) homology to a mammalian C1S target nucleic acid, such as a target nucleic acid of SEQ ID NO: 3 and/or SEQ ID NO: 5. In some embodiments, the naturally occurring variants are known polymorphisms.

[0103] Inhibition of Expression

[0104] The term “inhibition of expression” as used herein is to be understood as an overall term for a C1S inhibitor's ability to inhibit an amount or the activity of C1S in a target cell. Inhibition of expression or activity may be determined by measuring the level of C1S pre-mRNA or C1S mRNA, or by measuring the level of C1S protein or activity in a cell. Inhibition of expression may be determined in vitro or in vivo. Inhibition is determined by reference to a control. It is generally understood that the control is an individual or target cell treated with a saline composition.

[0105] The term “inhibitor,” “inhibition” or “inhibit” may also be referred to as down-regulate, reduce, suppress, lessen, lower, or decrease the amount, expression, and/or activity of C1S.

[0106] The inhibition of expression of C1S may occur e.g. by degradation of pre-mRNA or mRNA e.g. using RNase H recruiting oligonucleotides, such as gapmers, or nucleic acid molecules that function via the RNA interference pathway, such as siRNA or shRNA. Alternatively, the inhibitor of the present invention may bind to C1S mRNA or polypeptide and inhibit the activity of C1S or prevent its binding to other molecules.

[0107] In some embodiments, the inhibition of expression of the C1S target nucleic acid or the activity of C1S protein results in decreased amount of C1S protein in the target cell. Preferably, the amount of C1S protein is decreased as compared to a control. In some embodiments, the decrease in amount of C1S protein is at least 20%, at least 30%, as compared to a control. In some embodiments, the amount of C1S protein in the target cell is reduced by at least 50%, e.g., 50-60%, or at least 60%, e.g., 60-70%, or at least 70%, e.g., 70-80%, at least 80%, e.g., 80-90%, or at least 90%, e.g., 90-95%, when compared to a control.

[0108] Sugar Modifications

[0109] The oligonucleotide of the invention may comprise one or more nucleosides, which have a modified sugar moiety, i.e. a modification of the sugar moiety when compared to the ribose sugar moiety found in DNA and RNA.

[0110] Numerous nucleosides with modification of the ribose sugar moiety have been made, primarily with the aim of improving certain properties of oligonucleotides, such as affinity and/or nuclease resistance.

[0111] Such modifications include those where the ribose ring structure is modified, e.g. by replacement with a hexose ring (HNA), or a bicyclic ring, which typically have a biradical bridge between the C2 and C4 carbons on the ribose ring (LNA), or an unlinked ribose ring which typically lacks a bond between the C2 and C3 carbons (e.g. UNA). Other sugar-modified nucleosides include, for example, bicyclohexose nucleic acids (WO2011/017521) or tricyclic nucleic acids (WO2013/154798). Modified nucleosides also include nucleosides where the sugar moiety is replaced with a non-sugar moiety, for example in the case of peptide nucleic acids (PNA), or morpholino nucleic acids.

[0112] Sugar modifications also include modifications made via altering the one or more substituent groups on the ribose ring to groups other than hydrogen, or the 2′-OH group naturally found in DNA and RNA nucleosides. Substituents may, for example, be introduced at the 2′, 3′, 4′ or 5′ positions.

[0113] High Affinity Modified Nucleosides

[0114] A “high affinity modified nucleoside” is a modified nucleotide which, when incorporated into the oligonucleotide, enhances the affinity of the oligonucleotide for its complementary target, for example as measured by the melting temperature (Tm). A high affinity modified nucleoside of the present invention preferably results in an increase in melting temperature in the range of +0.5 to +12C, more preferably in the range of +1.5 to +10° C. and most preferably in the range of +3 to +8° C. per modified nucleoside. Numerous high affinity modified nucleosides are known in the art and include for example, many 2′ substituted nucleosides as well as locked nucleic acids (LNA) (see e.g. Freier & Altmann; Nucl. Acid Res., 1997, 25, 4429-4443 and Uhlmann; Curr. Opinion in Drug Development, 2000, 3(2), 293-213).

[0115] 2′ Sugar Modified Nucleosides

[0116] A 2′ sugar modified nucleoside is a nucleoside which has a substituent other than H or —OH at the 2′ position (2′ substituted nucleoside) or comprises a 2′ linked biradical capable of forming a bridge between the 2′ carbon and a second carbon in the ribose ring, such as LNA (2′-4′ biradical bridged) nucleosides.

[0117] Indeed, much focus has been spent on developing 2′ sugar substituted nucleosides, and numerous 2′ substituted nucleosides have been found to have beneficial properties when incorporated into oligonucleotides. For example, the 2′ modified sugar may provide enhanced binding affinity and/or increased nuclease resistance to the oligonucleotide. Examples of 2′ substituted modified nucleosides are 2′-O-alkyl-RNA, 2′-O-methyl-RNA, 2′-alkoxy-RNA, 2′-O-methoxyethyl-RNA (MOE), 2′-amino-DNA, 2′-Fluoro-RNA, and 2′-F-ANA nucleoside. For further examples, please see e.g. Freier & Altmann; Nucl. Acid Res., 1997, 25, 4429-4443 and Uhlmann; Curr. Opinion in Drug Development, 2000, 3(2), 293-213, and Deleavey and Damha, Chemistry and Biology 2012, 19, 937. Below are illustrations of some 2′ substituted modified nucleosides.

[chemical structure]

[0118] In relation to the present invention, a 2′ substituted sugar modified nucleoside does not include 2′ bridged nucleosides like LNA.

[0119] Locked Nucleic Acid Nucleosides (LNA Nucleoside)

[0120] A “LNA nucleoside” is a 2′-modified nucleoside which comprises a biradical linking the C2′ and C4′ of the ribose sugar ring of said nucleoside (also referred to as a “2′-4′ bridge”), which restricts or locks the conformation of the ribose ring. These nucleosides are also termed bridged nucleic acids or bicyclic nucleic acids (BNAs) in the literature. The locking of the conformation of the ribose is associated with an enhanced affinity of hybridization (duplex stabilization) when the LNA is incorporated into an oligonucleotide for a complementary RNA or DNA molecule. This can be routinely determined by measuring the melting temperature of the oligonucleotide/complement duplex.

[0121] Non limiting, exemplary LNA nucleosides are disclosed in WO 99/014226, WO 00/66604, WO 98/039352, WO 2004/046160, WO 00/047599, WO 2007/134181, WO 2010/077578, WO 2010/036698, WO 2007/090071, WO 2009/006478, WO 2011/156202, WO 2008/154401, WO 2009/067647, WO 2008/150729, Morita et al., Bioorganic & Med. Chem. Lett. 12, 73-76, Seth et al. J. Org. Chem. 2010, Vol 75(5) pp. 1569-81, and Mitsuoka et al., Nucleic Acids Research 2009, 37(4), 1225-1238, and Wan and Seth, J. Medical Chemistry 2016, 59, 9645-9667.

[0122] Particular examples of LNA nucleosides of the invention are presented in Scheme 1 (wherein B is as defined above).

[chemical structure]

[0123] Particular LNA nucleosides for use in molecules of the invention are beta-D-oxy-LNA, 6′-methyl-beta-D-oxy LNA such as (S)-6′-methyl-beta-D-oxy-LNA (ScET) and ENA. A particularly advantageous LNA is beta-D-oxy-LNA.

[0124] RNase H Activity and Recruitment

[0125] The RNase H activity of an antisense oligonucleotide refers to its ability to recruit RNase H when in a duplex with a complementary RNA molecule. WO01/23613, for example, provides in vitro methods for determining RNase H activity, which may be used to determine ability to recruit RNase H. Typically, an oligonucleotide is deemed capable of recruiting RNase H if it, when provided with a complementary target nucleic acid sequence, has an initial rate, as measured in pmol/l/min, of at least 5%, such as at least 10%-15% or more than 20%, e.g., 20-25%, or 20-30%, of the of the initial rate determined when using a oligonucleotide having the same base sequence as the modified oligonucleotide being tested, but containing only DNA monomers with phosphorothioate linkages between all monomers in the oligonucleotide, and using the methodology provided by Example 91-95 of WO 01/23613 (hereby incorporated by reference). For use in determining RNase H activity, recombinant human RNase H1 is available from Creative Biomart® (Recombinant Human RNase H1 fused with His tag expressed in E. coli).

[0126] Gapmer

[0127] The antisense oligonucleotide of the invention, or contiguous nucleotide sequence thereof, may be a gapmer, also termed gapmer oligonucleotide or gapmer designs. Antisense gapmers are commonly used to inhibit a target nucleic acid via RNase H mediated degradation. A gapmer oligonucleotide comprises at least three distinct structural regions: a 5′-flank, a gap, and a 3′-flank, F-G-F′ in the ‘5->3’ orientation. The “gap” region (G) comprises a stretch of contiguous DNA nucleotides, which enable the oligonucleotide to recruit RNase H. The gap region is flanked by a 5′ flanking region (F) comprising one or more sugar modified nucleosides, advantageously high affinity sugar modified nucleosides, and by a 3′ flanking region (F′) comprising one or more sugar modified nucleosides, advantageously high affinity sugar modified nucleosides. The one or more sugar modified nucleosides in region F and F′ enhance the affinity of the oligonucleotide for the target nucleic acid (i.e. are affinity enhancing sugar modified nucleosides). In some embodiments, the one or more sugar modified nucleosides in region F and F′ are 2′ sugar modified nucleosides, such as high affinity 2′ sugar modifications, such as independently selected from LNA and 2′-MOE.

[0128] In a gapmer design, the 5′ and 3′ most nucleosides of the gap region are DNA nucleosides, and are positioned adjacent to a sugar modified nucleoside of the 5′ (F) and/or 3′ (F′) region respectively. The flanks may further be defined by having at least one sugar modified nucleoside at the end most distant from the gap region, i.e. at the 5′ end of the 5′ flank and at the 3′ end of the 3′ flank.

[0129] Regions F-G-F′ form a contiguous nucleotide sequence. Antisense oligonucleotides of the invention, or the contiguous nucleotide sequence thereof, may comprise a gapmer region of formula F-G-F′.

[0130] The overall length of the gapmer design F-G-F′ may be, for example 12 to 32 nucleosides, such as 13 to 24, such as 14 to 22 nucleosides, such as 15 to 21 nucleosides.

[0131] By way of example, the gapmer oligonucleotide of the present invention can be represented by the following formulae:

F₁₋₈-G₅₋₁₆-F′₁₋₈,such as

F₁₋₈-G₇₋₁₆-F₂₋₈

with the proviso that the overall length of the gapmer regions F-G-F′ is at least 12 (e.g., 12-15 nucleotides), such as at least 14 nucleotides (e.g., 14-20 nucleotides) in length.

[0132] In an aspect of the invention, the antisense oligonucleotide or contiguous nucleotide sequence thereof consists of or comprises a gapmer of formula 5′-F-G-F′-3′, where region F and F′ independently comprise or consist of 1-8 nucleosides, of which 1-4 are 2′ sugar modified and define the 5′ and 3′ ends of the F and F′ region, respectively, and G is a region between 6 and 16 nucleosides which are capable of recruiting RNaseH.

[0133] In an aspect of the invention, the antisense oligonucleotide or contiguous nucleotide sequence thereof consists of or comprises a gapmer of formula 5′-F-G-F′-3′, where region F and F′ independently comprise or consist of 1-8 nucleosides, of which 1-4 are 2′ sugar modified and define the 5′ and 3′ end of the F and F′ region, respectively, and G is a region between 6 and 18 nucleosides which are capable of recruiting RNase H. In some embodiments, the G region consists of DNA nucleosides.

[0134] In some embodiments, region F and F′ independently consists of or comprises a contiguous sequence of sugar-modified nucleosides. In some embodiments, the sugar modified nucleosides of region F may be independently selected from 2′-O-alkyl-RNA units, 2′-O-methyl-RNA, 2′-amino-DNA units, 2′-fluoro-DNA units, 2′-alkoxy-RNA, MOE units, LNA units, arabino nucleic acid (ANA) units and 2′-fluoro-ANA units.

[0135] In some embodiments, region F and F′ independently comprises both LNA and a 2′-substituted sugar modified nucleotide (mixed wing design). In some embodiments, the 2′-substituted sugar modified nucleotide is independently selected from the group consisting of 2′-O-alkyl-RNA units, 2′-O-methyl-RNA, 2′-amino-DNA units, 2′-fluoro-DNA units, 2′-alkoxy-RNA, MOE units, arabino nucleic acid (ANA) units and 2′-fluoro-ANA units.

[0136] In some embodiments, all the modified nucleosides of region F and F′ are LNA nucleosides, such as independently selected from beta-D-oxy LNA, ENA or ScET nucleosides, wherein region F or F′, or F and F′ may optionally comprise DNA nucleosides. In some embodiments, all the modified nucleosides of region F and F′ are beta-D-oxy LNA nucleosides, wherein region F or F′, or F and F′ may optionally comprise DNA nucleosides. In such embodiments, the flanking region F or F′, or both F and F′ comprise at least three nucleosides, wherein the 5′ and 3′ most nucleosides of the F and/or F′ region are LNA nucleosides.

[0137] LNA Gapmer

[0138] An “LNA gapmer” is a gapmer wherein either one or both of region F and F′ comprises or consists of LNA nucleosides. A beta-D-oxy gapmer is a gapmer wherein either one or both of region F and F′ comprises or consists of beta-D-oxy LNA nucleosides.

[0139] In some embodiments, the LNA gapmer is of formula: [LNA]₁₋₅-[region G]₆₋₁₈-[LNA]₁₋₅, wherein region G is as defined in the Gapmer region G definition.

[0140] MOE Gapmers

[0141] An “MOE gapmer” is a gapmer wherein regions F and F′ consist of MOE (methoxyethy) nucleosides. In some embodiments, the MOE gapmer is of design [MOE]₁₋₈-[Region G]₅₋₁₆-[MOE]₁₋₈, such as [MOE]₂₋₇-[Region G]₆₋₁₄-[MOE]₂₋₇, such as [MOE]₃₋₆-[Region G]₈₋₁₂-[MOE]₃₋₆, such as [MOE]₅-[Region G]₁₀-[MOE]₅ wherein region G is as defined in the Gapmer definition. MOE gapmers with a 5-10-5 design (MOE-DNA-MOE) have been widely used in the art.

[0142] Region D′ or D″ in an Oligonucleotide

[0143] The oligonucleotide of the invention may in some embodiments comprise or consist of the contiguous nucleotide sequence of the oligonucleotide which is complementary to the target nucleic acid, such as a gapmer region F-G-F′, may further comprise 5′ and/or 3′ nucleosides. The further 5′ and/or 3′ nucleosides may or may not be fully complementary to the target nucleic acid. Such further 5′ and/or 3′ nucleosides may be referred to as region D′ and D″ herein.

[0144] The addition of region D′ or D″ may be used for the purpose of joining the contiguous nucleotide sequence, such as the gapmer, to a conjugate moiety or another functional group. When used for joining the contiguous nucleotide sequence with a conjugate moiety is can serve as a biocleavable linker. Alternatively, it may be used to provide exonucleoase protection or for ease of synthesis or manufacture.

[0145] Region D′ and D″ can be attached to the 5′ end of region F or the 3′ end of region F′, respectively to generate designs of the following formulas D′-F-G-F′, F-G-F′-D″ or D′-F-G-F′-D″. In this instance, the F-G-F′ is the gapmer portion of the oligonucleotide and region D′ or D″ constitute a separate part of the oligonucleotide.

[0146] Region D′ or D″ may independently comprise or consist of 1, 2, 3, 4 or 5 additional nucleotides, which may be complementary or non-complementary to the target nucleic acid. In some embodiments, the nucleotide adjacent to the F or F′ region is not a sugar-modified nucleotide, such as a DNA or RNA or base modified versions of these. The D′ or D′ region may serve as a nuclease susceptible biocleavable linker (see definition of linkers). In some embodiments, the additional 5′ and/or 3′ end nucleotides are linked with phosphodiester linkages, and are DNA or RNA. Nucleotide based biocleavable linkers suitable for use as region D′ or D″ are disclosed, for example, in WO2014/076195, which include by way of example a phosphodiester linked DNA dinucleotide. The use of biocleavable linkers in poly-oligonucleotide constructs is disclosed, for example, in WO2015/113922, where they are used to link multiple antisense constructs (e.g. gapmer regions) within a single oligonucleotide.

[0147] In one embodiment the oligonucleotide of the invention comprises a region D′ and/or D″ in addition to the contiguous nucleotide sequence which constitutes the gapmer.

[0148] In some embodiments, the oligonucleotide of the present invention can be represented by one or more of the following formulae:

F-G-F′; in particular F₁₋₈-G₅₋₁₈-F′₂₋₈

D′-F-G-F′, in particular D′₁₋₃-F₁₋₈-G₅₋₁₈-F₂₋₈

F-G-F′-D″, in particular F₁₋₈-G₅₋₁₈-F′₂₋₈-D″₁₋₃

D′-F-G-F′-D″, in particular D′₁₋₃-F₁₋₈-G₅₋₁₈-F′₂₋₈-D″₁₋₃

[0149] In some embodiments the internucleoside linkage positioned between region D′ and region F is a phosphodiester linkage. In some embodiments the internucleoside linkage positioned between region F′ and region D″ is a phosphodiester linkage.

[0150] Treatment

[0151] The term “treatment” as used herein refers to both treatment of an existing disease (e.g. a disease or disorder as herein referred to), or prevention of a disease, i.e. prophylaxis. Prophylaxis also includes delaying or reducing the likelihood of disease occurrence, delaying or reducing frequency of relapse of the disease, and/or reducing severity or duration of the disease if the subject eventually succumbs to the disease. It will therefore be recognized that treatment as referred to herein may, in some embodiments, be prophylactic. In some embodiments, treatment is performed on a patient who has been diagnosed with a complement mediated neurological disease, such as a neurological disease selected from the group consisting of Alzheimer's disease, frontotemporal dementia, multiple sclerosis, amyotrophic lateral sclerosis, Huntington's disease, Parkinson's disease, virus-induced cognitive impairment, glaucoma, macular degeneration, myasthenia gravis, Guillain-Barré syndrome, neuromyelitis optica, central nervous system lupus erythematosus, and schizophrenia. In some embodiments, the compounds of the invention are for use in the treatment of a tauopathy, such as Alzheimer's disease. In some embodiments, the compounds of the invention are for use in the treatment of schizophrenia.

[0152] Patient

[0153] For the purposes of the present invention, the “subject” (or “patient”) may be a vertebrate. In context of the present invention, the term “subject” includes both humans and other animals, particularly mammals, and other organisms. Thus, the herein provided means and methods are applicable to both human therapy and veterinary applications. Preferably, the subject is a mammal. More preferably, the subject is human.

[0154] As described elsewhere herein, the patient to be treated may suffer from or be susceptible to a neurological disease or neurodegenerative disorder. A patient “susceptible to” a disease or disorder is one who is pre-disposed thereto and/or otherwise at risk of developing or having a recurrence of the disease or disorder. A susceptible patient can be understood a patent likely to develop the disease or disorder, to the extent that the patient would benefit from prophylactic treatment or intervention.

[0155] By “neurological disease” is meant a disease or disorder of the nervous system including, but not limited to, neurological conditions associated with cancer, and neurodegenerative disease.

[0156] By “neurodegenerative disease” is meant diseases including, but not limited to Alzheimer's disease, frontotemporal dementia, multiple sclerosis, amyotrophic lateral sclerosis, Huntington's disease, Parkinson's disease, virus-induced cognitive impairment, glaucoma, macular degeneration, myasthenia gravis, Guillain-Barre syndrome, neuromyelitis optica, central nervous system lupus erythematosus, and schizophrenia. In some embodiments, the patient to be treated suffers from a tauopathy, such as Alzheimer's disease. In some embodiments, the patient to be treated suffers from schizophrenia.

[0157] Alzheimer's disease (AD), also referred to as Alzheimer disease or “Alzheimer's,” is a chronic neurodegenerative disorder typically characterized by progressive cognitive deterioration, as well as increasing memory loss, problems with language, judgment, and/or problem solving, and that can lead to inability to perform daily tasks, and eventually dementia.

### DETAILED DESCRIPTION OF THE INVENTION

[0158] Synapse removal and neuronal damage can be mediated by the classical pathway of the complement system, which is initiated by activation of the C1, leading to cleavage of C2 and C4, which in turn lead to cleavage of C3 which can trigger phagocytosis as well as inflammation and further downstream complement activation. Complement C1r subcomponent (CIR) is a protein involved in the complement system.

[0159] C1R, C1Q and C1S form the C1 complex, which is the first component of the serum complement system. C1R is serine protease that another serine protease, C1S, to its active form by proteolytic cleavage. After proteolytic cleavage, C1S activates C2 and C4, which leads to the cleavage of C3.

[0160] In the context of the present invention, the present inventors have shown that nucleic acid molecules, such as antisense oligonucleotides, inhibit the expression of C1S. Reduced expression of C1S can lead to reduced cleavage of C2 and C4, and thus to reduced cleavage of C3, and thereby to reduced engulfment of synapses by microglia cells and other harmful effects of complement activation.

[0161] One aspect of the present invention is a C1S inhibitor for use in the treatment and/or prevention of a neurological disease, in particular a neurological disease selected from a tauopathy and schizophrenia. In some embodiments, the tauopathy is Alzheimer's disease. The C1R inhibitor can for example be a small molecule that specifically binds to the C1S protein, wherein said inhibitor prevents or reduces cleavage of the C2 and/or C4 protein.

[0162] An embodiment of the invention is a C1S inhibitor, which is capable of preventing or reducing expression of C1S protein thereby leading to reduced cleavage of C2 and/or C4. In some embodiments, the C1S inhibitor leads to inhibition of engulfment of synapses by microglia cells.

[0163] C1S Inhibitors for Use in Treatment of Neurological Diseases

[0164] Without being bound by theory, it is believed that C1S is involved in the in the cleavage of C2 and C4, which may lead to the cleavage of C3. Therefore, it is believed that C1S is involved in the engulfment of synapses by microglia cells.

[0165] In some embodiments of the present invention, the inhibitor is an antibody, antibody fragment or a small molecule compound. In some embodiments, the inhibitor may be an antibody, antibody fragment or a small molecule that specifically binds to the C1S protein. In some embodiments, the C1S protein is encoded by a sequence selected from SEQ ID NO: 3, 4, 5, and 6, such as SEQ ID NO: 3 or SEQ ID NO: 6.

[0166] Nucleic Acid Molecules of the Invention

[0167] Therapeutic nucleic acid molecules find use as C1S inhibitors since they can target C1S transcripts and promote their degradation, e.g., either via the RNA interference pathway or via RNase H cleavage. Alternatively, oligonucleotides such as aptamers can also act as inhibitors of C1S proteins.

[0168] One aspect of the present invention is a C1S targeting nucleic acid molecule for use in treatment and/or prevention of neurological diseases. Such a nucleic acid molecule can be selected from the group consisting of a single stranded antisense oligonucleotide, an siRNA, and a shRNA.

[0169] The present section describes novel nucleic acid molecules suitable for use in treatment and/or prevention of a neurological disease. In some embodiments, the neurological disease is selected from the group consisting of Alzheimer's disease, frontotemporal dementia, multiple sclerosis, amyotrophic lateral sclerosis, Huntington's disease, Parkinson's disease, virus-induced cognitive impairment, glaucoma, macular degeneration, myasthenia gravis, Guillain-Barre syndrome, neuromyelitis optical, central nervous system lupus erythematosus, and schizophrenia. In some embodiments, the neurological disease is a tauopathy, such as Alzheimer's disease. In some embodiments, the neurological disease is schizophrenia.

[0170] The nucleic acid molecules of the present invention are capable of inhibiting C1S mRNA and/or expression of C1S protein in vitro and in vivo. The inhibition may be achieved by hybridizing an oligonucleotide to a target nucleic acid encoding a C1S protein. In some embodiments, the target nucleic acid may be a mammalian C1S sequence. In some embodiments, the target nucleic acid may be a human C1S pre-mRNA sequence, such as the sequence of SEQ ID NO: 3 or a human mature C1S mRNA sequence, such as the sequence of SEQ ID NO:6. In some embodiments, the target nucleic acid may be a cynomolgus monkey C1S sequence such as the sequence of SEQ ID NO: 4. In some embodiments, the target nucleic acid may be a cynomolgus monkey C1S sequence such as the sequence of SEQ ID NO: 5.

[0171] In some embodiments, the nucleic acid molecule of the invention is capable of modulating the expression of the target by inhibiting or down-regulating it. Preferably, such modulation produces an inhibition of expression of at least 20% (e.g., 20-30%) compared to the normal expression level of the target, more preferably at least 30% (e.g., 30-40%), at least 40% (e.g., 40-50%), or at least 50% (e.g., 50-60%), inhibition compared to the normal expression level of the target. In some embodiments, the nucleic acid of the invention may be capable of inhibiting expression levels of C1S mRNA by at least (e.g., 50-60%) or 60% (e.g., 50-60%) in vitro by using 20-50 nM nucleic acid molecule for transfection. In some embodiments, the nucleic acid molecule of the invention may be capable of inhibiting expression levels of C1S mRNA by at least 50% (e.g., 50-60%) or 60% (e.g., 50-60%) in vitro by using 50-350 nM nucleic acid molecule for gymnosis. Suitably, the examples provide assays, which may be used to measure C1S mRNA inhibition (e.g. Example 1 and the “Materials and Methods” section). C1S inhibition is triggered by the hybridization between a contiguous nucleotide sequence of the oligonucleotide, such as the guide strand of a siRNA or gapmer region of an antisense oligonucleotide, and the target nucleic acid. In some embodiments, the nucleic acid molecule of the invention comprises mismatches between the oligonucleotide and the target nucleic acid. Despite mismatches, hybridization to the target nucleic acid may still be sufficient to show a desired inhibition of C1S expression. Reduced binding affinity resulting from mismatches may advantageously be compensated by increased number of nucleotides in the oligonucleotide complementary to the target nucleic acid and/or an increased number of modified nucleosides capable of increasing the binding affinity to the target, such as 2′ sugar modified nucleosides, including LNA, present within the oligonucleotide sequence.

[0172] An aspect of the present invention relates to a nucleic acid molecule of 12 to 60 nucleotides in length, which comprises a contiguous nucleotide sequence of at least 12 nucleotides in length, such as at least 12 to 30 nucleotides in length, which is at least 95% complementary, such as fully complementary, to a mammalian C1S target nucleic acid, in particular a human C1S mRNA. These nucleic acid molecules are capable of inhibiting the expression of C1S mRNA and/or C1S protein.

[0173] An aspect of the invention relates to a nucleic acid molecule of 12 to 30 nucleotides in length, comprising a contiguous nucleotide sequence of at least 12 nucleotides, such as 12 to 30, or such as 15 to 21 nucleotides in length, which is at least 90% complementary, such as fully complementary, to a mammalian C1S target sequence.

[0174] A further aspect of the present invention relates to a nucleic acid molecule according to the invention comprising a contiguous nucleotide sequence of 14 to 22, such as 15 to 21 nucleotides in length with at least 90% complementary, such as fully complementary, to the target sequence of SEQ ID NO: 3.

[0175] In some embodiments, the nucleic acid molecule comprises a contiguous sequence of 12 to 30 nucleotides in length, which is at least 90% complementary, such as at least 91%, such as at least 92%, such as at least 93%, such as at least 94%, such as at least 95%, such as at least 96%, such as at least 97%, such as at least 98%, or 100% complementary with a region of the target nucleic acid or a target sequence.

[0176] It is advantageous if the oligonucleotide, or contiguous nucleotide sequence thereof is fully complementary (100% complementary) to a region of the target sequence, or in some embodiments may comprise one or two mismatches between the oligonucleotide and the target sequence.

[0177] In some embodiments, the oligonucleotide sequence is 100% complementary to a region of the target sequence of SEQ ID NO: 3, and/or SEQ ID NO: 6.

[0178] In some embodiments, the nucleic acid molecule or the contiguous nucleotide sequence of the invention is at least 90% or 95% complementary, such as fully (or 100%) complementary, to the target nucleic acid of SEQ ID NO: 3.

[0179] In some embodiments, the oligonucleotide or the contiguous nucleotide sequence of the invention is at least 90% or 95% complementary, such as fully (or 100%) complementary, to the target nucleic acid of SEQ ID NO: 4 and 5 and/or SEQ ID NO: 6.

[0180] In some embodiments, the oligonucleotide or the contiguous nucleotide sequence of the invention is at least 90% or 95% complementary, such as fully (or 100%) complementary, to the target nucleic acid of SEQ ID NO: 1 and 2, and/or SEQ ID NO: 3, and/or SEQ ID NO: 4 and 5.

[0181] In some embodiments, the contiguous sequence of the nucleic acid molecule of the present invention is least 90% complementary, such as fully complementary to a region of SEQ ID NO: 3, selected from the group consisting of target regions 1A to 1499A as shown in Table 4.

[0182] In some embodiments, the nucleic acid molecule of the invention comprises or consists of 12 to 60 nucleotides in length, such as from 13 to 50, such as from 14 to 35, such as 15 to 30, such as from to 21 contiguous nucleotides in length. In a preferred embodiment, the nucleic acid molecule comprises or consists of 15, 16, 17, 18, 19, 20 or 21 nucleotides in length.

[0183] In some embodiments, the contiguous nucleotide sequence of the nucleic acid molecule, which is complementary to the target nucleic acids, comprises or consists of 12 to 30, such as from 13 to such as from 15 to 21 contiguous nucleotides in length.

[0184] In some embodiments, the oligonucleotide is selected from the group consisting of an antisense oligonucleotide, an siRNA and a shRNA.

[0185] In some embodiments, the contiguous nucleotide sequence of the siRNA or shRNA, which is complementary to the target sequence, comprises or consists of 18 to 28, such as from 19 to 26, such as from 20 to 24, such as from 21 to 23, contiguous nucleotides in length.

[0186] In some embodiments, the contiguous nucleotide sequence of the antisense oligonucleotide, which is complementary to the target nucleic acids, comprises or consists of 12 to 22, such as from 14 to 21, such as from 15 to 21 such as from 15, 16, 17, 18, 19, 20, or 21 contiguous nucleotides in length.

[0187] In some embodiments, the oligonucleotide or contiguous nucleotide sequence comprises or consists of a sequence selected from the group consisting of sequences listed in Table 8 (Materials and Methods section).

[0188] It is understood that the contiguous oligonucleotide sequence (motif sequence) can be modified to, for example, increase nuclease resistance and/or binding affinity to the target nucleic acid.

[0189] The pattern in which the modified nucleosides (such as high affinity modified nucleosides) are incorporated into the oligonucleotide sequence is generally termed oligonucleotide design.

[0190] The nucleic acid molecule of the invention may be designed with modified nucleosides and RNA nucleosides (in particular for siRNA and shRNA molecules) or DNA nucleosides (in particular for single stranded antisense oligonucleotides).

[0191] In advantageous embodiments, the nucleic acid molecule or contiguous nucleotide sequence comprises one or more sugar modified nucleosides, such as 2′ sugar modified nucleosides, such as comprise one or more 2′ sugar modified nucleoside independently selected from the group consisting of 2′-O-alkyl-RNA, 2′-O-methyl-RNA, 2′-alkoxy-RNA, 2′-O-methoxyethyl-RNA, 2′-amino-DNA, 2′-fluoro-DNA, arabino nucleic acid (ANA), 2′-fluoro-ANA and LNA nucleosides. It is advantageous if one or more of the modified nucleoside(s) is a locked nucleic acid (LNA).

[0192] In some embodiments, the contiguous nucleotide sequence comprises LNA nucleosides.

[0193] In some embodiments, the contiguous nucleotide sequence comprises LNA nucleosides and DNA nucleosides.

[0194] In some embodiments, the contiguous nucleotide sequence comprises 2′-O-methoxyethyl (2′MOE) nucleosides.

[0195] In some embodiments, the contiguous nucleotide sequence comprises 2′-O-methoxyethyl (2′MOE) nucleosides and DNA nucleosides.

[0196] Advantageously, the 3′ most nucleoside of the antisense oligonucleotide, or contiguous nucleotide sequence thereof, is a 2′sugar modified nucleoside.

[0197] In a further embodiment, the nucleic acid molecule comprises at least one modified internucleoside linkage. Suitable internucleoside modifications are described in the “Definitions” section under “Modified internucleoside linkage”.

[0198] Advantageously, the oligonucleotide comprises at least one modified internucleoside linkage, such as phosphorothioate or phosphorodithioate.

[0199] In some embodiments, at least one internucleoside linkage in the contiguous nucleotide sequence is a phosphodiester internucleoside linkage.

[0200] It is advantageous if at least 2 to 3 internucleoside linkages at the 5′ or 3′ end of the oligonucleotide are phosphorothioate internucleoside linkages.

[0201] For single stranded antisense oligonucleotides, it is advantageous if at least 75%, such as 70-80%, at least 90%, such as 90-95%, or all, the internucleoside linkages within the contiguous nucleotide sequence are phosphorothioate internucleoside linkages. In some embodiments, all the internucleotide linkages in the contiguous sequence of the single stranded antisense oligonucleotide are phosphorothioate linkages.

[0202] In an advantageous embodiment of the invention, the antisense oligonucleotide of the invention is capable of recruiting RNase H, such as RNase H1. An advantageous structural design is a gapmer design as described in the “Definitions” section under for example “Gapmer”, “LNA Gapmer” and “MOE gapmer”. In the present invention it is advantageous if the antisense oligonucleotide of the invention is a gapmer with an F-G-F′ design.

[0203] In some embodiments, the F-G-F′ design may further include region D′ and/or D″ as described in the “Definitions” section under “Region D′ or D” in an oligonucleotide”.

[0204] In some embodiments, the inhibitor of the present invention is a nucleic acid capable of inducing the process of RNA interference (as described, e.g., in WO 2014/089121).

[0205] Method of Manufacture

[0206] In a further aspect, the invention provides methods for manufacturing the oligonucleotide of the invention. In some embodiments, the method comprises reacting nucleotide units and thereby forming covalently linked contiguous nucleotide units comprised in the oligonucleotide in a sequence according to a nucleic acid molecule of the present invention. Preferably, the method uses phophoramidite chemistry (see for example Caruthers et al, 1987, Methods in Enzymology vol. 154, pages 287-313).

[0207] The manufactured oligonucleotides may comprise one or more modifications as described herein. For example, the manufactured oligonucleotides may comprise one or more sugar-modified nucleosides, one or more modified internucleoside linkages and/or one or more modified nucleobases. Accordingly, the method for manufacturing the oligonucleotide of the invention may further comprise the introduction of such modifications into the oligonucleotide.

[0208] In some embodiments, one or more modified internucleoside linkages, such as phosphorothioate internucleoside linkages, may be introduced into the oligonucleotide. In some embodiments, one or more sugar-modified nucleosides, such as 2′ sugar modified nucleosides, may be introduced. In some embodiments, one or more high affinity modified nucleosides and/or one or more LNA nucleosides may be introduced into the oligonucleotide. In some embodiments, region D′ and/or D″ as described elsewhere herein are added to the oligonucleotide.

[0209] In a further aspect, a method is provided for manufacturing the pharmaceutical composition of the invention, comprising mixing the oligonucleotides of the invention with a pharmaceutically acceptable diluent, solvent, carrier, salt and/or adjuvant.

[0210] As described elsewhere herein in more detail, the oligonucleotide of the invention may exist in the form of its pharmaceutically acceptable salts, esters, solvates or in the form of prodrugs. Accordingly, methods are provided for manufacturing the oligonucleotide of the invention in such forms.

[0211] Pharmaceutically Salts

[0212] The compounds according to the present invention may exist in the form of their pharmaceutically acceptable salts. The term “pharmaceutically acceptable salt” refers to conventional acid-addition salts or base-addition salts that retain the biological effectiveness and properties of the compounds of the present invention. In a further aspect, the invention provides a pharmaceutically acceptable salt of the nucleic acid molecules, such as a pharmaceutically acceptable sodium salt, ammonium salt or potassium salt. By way of example, the following salts may be mentioned: Alkaline metal salts such as sodium salts, potassium salts or lithium salts; alkaline earth metal salts such as calcium salts or magnesium salts; metal salts such as aluminum salts, iron salts, zinc salts, copper salts; amine salts including inorganic salts such as ammonium salts and organic salts such as t-octylamine salts, dibenzylamine salts, morpholine salts, glucosamine salts, phenylglycine alkyl ester salts, ethylenediamine salts, N-methylglucamine salts, guanidine salts, diethylamine salts, triethylamine salts, dicyclohexylamine salts, N,N′-dibenzylethylenediamine salts, chloroprocaine salts, procaine salts, diethanolamine salts, N-benzyl-phenethylamine salts, piperazine salts, tetramethylammonium salts or tris(hydroxymethyl)aminomethane salts; inorganic acid salts including hydrohalogenic acid salts such as hydrofluorides, hydrochlorides, hydrobromides or hydroiodides, sulfates or phosphates; organic acid salts including lower alkane sulfonic acid salts such as methanesulfonates, trifluoromethanesulfonates or ethanesulfonates, arylsulfonic acid salts such as benzenesulfonates or p-toluenesulfonates, acetates, malates, fumarates, succinates, citrates, tartrates, oxalates or maleates; and amino acid salts such as glycine salts, lysine salts, arginine salts, ornithine salts, glutamic acid salts or aspartic acid salts. These salts may be prepared by known methods.

[0213] In a further aspect, the invention provides a pharmaceutically acceptable salt of the nucleic acid molecule of the invention, such as a pharmaceutically acceptable sodium salt, ammonium salt or potassium salt.

[0214] Solvates

[0215] The compounds according to the present invention may exist in the form of solvates. The term ‘solvate’ is used herein to describe a molecular complex comprising the oligonucleotide of the invention and one or more pharmaceutically acceptable solvent molecules, for example, ethanol or water. If the solvent is water, the solvate is a ‘hydrate’. Pharmaceutically acceptable solvates within the meaning of the present invention include hydrates and other solvates.

[0216] Prodrugs

[0217] Further, the compounds according to the present invention may be administered in the form of a prodrug. A prodrug is defined as a compound that undergoes transformations in vivo to yield the parent active drug. Because cell membranes are lipophilic in nature, cellular uptake of oligonucleotides is often reduced compared to neutral or lipophilic equivalents. One solution is to use a prodrug approach (see e.g. Crooke, R. M. (1998) in Crooke, S. T. Antisense research and Application. Springer-Verlag, Berlin, Germany, vol. 131, pp. 103-140). Examples of such prodrug include, but are not limited to, amides, esters, carbamates, carbonates, ureides and phosphates. These prodrugs may be prepared by known methods.

[0218] Pharmaceutical Composition

[0219] In a further aspect, the invention provides pharmaceutical compositions comprising any of the compounds of the invention, in particular the aforementioned nucleic acid molecules or salts thereof and a pharmaceutically acceptable diluent, carrier, salt and/or adjuvant. A pharmaceutically acceptable diluent includes, but is not limited to, phosphate-buffered saline (PBS). Pharmaceutically acceptable salts include, but are not limited to, sodium and potassium salts. In some embodiments the pharmaceutically acceptable diluent is sterile phosphate buffered saline. In some embodiments, the nucleic acid molecule is used in the pharmaceutically acceptable diluent at a concentration of 50 to 300 μM solution. Suitable formulations for use in the present invention are found in Remington's Pharmaceutical Sciences, Mack Publishing Company, Philadelphia, Pa., 17th ed., 1985. For a brief review of methods for drug delivery, see, e.g., Langer (Science 249:1527-1533, 1990). WO 2007/031091, e.g., provides further suitable and preferred examples of pharmaceutically acceptable diluents, carriers and adjuvants (hereby incorporated by reference). Suitable dosages, formulations, administration routes, compositions, dosage forms, combinations with other therapeutic agents, pro-drug formulations, and the like, are also provided, e.g., in WO2007/031091. In some embodiments, the nucleic acid molecule of the invention or pharmaceutically acceptable salt thereof is in a solid form, such as a powder, such as a lyophilized powder. Compounds or nucleic acid molecules of the invention may be mixed with pharmaceutically acceptable active or inert substances for the preparation of pharmaceutical compositions or formulations. Compositions and methods for the formulation of pharmaceutical compositions are dependent upon a number of criteria, including, but not limited to, route of administration, extent of disease, or dose to be administered. These compositions may be sterilized by conventional sterilization techniques, or may be sterile filtered. The resulting aqueous solutions may be packaged for use as is, or lyophilized, the lyophilized preparation being combined with a sterile aqueous carrier prior to administration. The pH of the preparations typically will be between 3 and 11, more preferably between 5 and 9 or between 6 and 8, and most preferably between 7 and 8, such as 7 to 7.5. The resulting compositions in solid form may be packaged in multiple single dose units, each containing a fixed amount of the above-mentioned agent or agents, such as in a sealed package of tablets or capsules. The composition in solid form can also be packaged in a container for a flexible quantity, such as in a squeezable tube designed for a topically applicable cream or ointment.

[0220] Administration

[0221] The oligonucleotides or pharmaceutical compositions of the present invention may be administered via parenteral (such as, intravenous, subcutaneous, intra-muscular, intranasal, intracerebral, intracerebroventricular intraocular, or intrathecal administration).

[0222] In some embodiments, the administration is via intrathecal administration, e.g., by lumbar puncture.

[0223] Advantageously, e.g. for treatment of neurological disorders, the oligonucleotide or pharmaceutical compositions of the present invention are administered intrathecally or intracranially, e.g. via intracerebral or intraventricular administration.

[0224] The invention also provides for the use of the oligonucleotide or conjugate thereof, such as pharmaceutical salts or compositions of the invention, for the manufacture of a medicament wherein the medicament is in a dosage form for subcutaneous administration.

[0225] The invention also provides for the use of the oligonucleotide of the invention, or conjugate thereof, such as pharmaceutical salts or compositions of the invention, for the manufacture of a medicament wherein the medicament is in a dosage form for intrathecal administration.

[0226] In some embodiments, a therapeutically or prophylactically effective amount of the oligonucleotide or pharmaceutical composition of the present invention is administered.

[0227] Delivery Platforms

[0228] Delivery of the oligonucleotides to the target tissue may be enhanced by carrier-mediated delivery including, but not limited to, cationic liposomes, cyclodextrins, porphyrin derivatives, branched chain dendrimers, polyethylenimine polymers, nanoparticles, cell-penetrating peptides, and microspheres (see e.g. Dass, C R. J Pharm Pharmacol 2002; 54(1):3-27).

[0229] In some embodiments, the inhibitors of the present invention, such as the oligonucleotides of the present invention, are targeted to the brain. For example, delivery to the brain might be achieved by conjugating said inhibitor to a moiety that facilitates delivery across the blood brain barrier, such as an antibody or antibody fragment targeting the transferrin receptor.

[0230] Combination Therapies

[0231] In some embodiments, the inhibitor of the present invention such as the nucleic acid molecule, nucleic acid molecule conjugate, pharmaceutically acceptable salt, or pharmaceutical composition of the invention is for use in a combination treatment with another therapeutic agent. The therapeutic agent can for example be the standard of care for the diseases or disorders described above.

[0232] By way of example, the inhibitor of the present invention may be used in combination with other actives, such as oligonucleotide-based therapeutic agents—such as sequence specific oligonucleotide-based therapeutic agents—acting through nucleotide sequence-dependent mode of action.

[0233] By way of further example, the inhibitor of the present invention may be used in combination with one or more acetylcholinesterase inhibitors and/or one or more NMDA receptor antagonists. A cholinesterase inhibitor may be, for example, donepezil, tacrine, galantamine or rivastigmine. A NMDA receptor antagonist may be, for example, memantine.

[0234] By way of further example, the inhibitor of the present invention may be used in combination with one or more typical antipsychotics and/or one or more atypical antipsychotics. A typical antipsychotic may be, for example, chlorpromazine, fluphenazine, haloperidol, perphenazine, thioridazine, thiothixene, or trifluoperazine. An atypical antipsychotic may be, for example, aripiprazole, aripiprazole lauroxil, asenapine, brexpiprazole, cariprazine, clozapine, Iloperidone, lumateperone tosylate, lurasidone, olanzapine, paliperidone, aliperidone palmitate, or ziprasidone.

[0235] In some embodiments, the inhibitor of the present invention is used in combination with one or more of the following: an antisense compound that targets C9ORT72 (e.g., as described in WO 2014/062736); an antisense oligonucleotide, aptamer, miRNA, ribozyme, or siRNA that blocks expression of one or more of C3 convertase, C5, C6, C7, C8, and C9 (e.g., as described in WO 2008/044928); an antibody that blocks the activity of one or more of C3 convertase, C5, C6, C7, C8, and C9 (e.g., as described in WO 2008/044928); an antisense or double stranded RNA that decreases activity of the complement cascade (e.g., as described in WO 2005/060667); and an antibody that binds C1s protein, e.g., to inhibit proteolytic activity of C1s (e.g., as described in WO 2014/066744).

[0236] In some embodiments, the inhibitor of the present invention is used in combination with an antibody that binds to complement C4 or the C4b portion of C4 (e.g., as described in WO 2017/196969).

[0237] In some embodiments, the inhibitor of the present invention is used in combination with one or more nucleic acid molecules disclosed in U.S. Provisional Application filed May 11, 2020, entitled “Complement Component C4 Inhibitors For Treating A Neurological Disease, And Related Compositions, Systems And Methods Of Using Same” and US Provisional Application filed May 11, 2020, entitled “Complement Component C1R Inhibitors For Treating A Neurological Disease, And Related Compositions, Systems And Methods Of Using Same,”

[0238] Applications

[0239] The nucleic acid molecules of the invention may be utilized as research reagents for, for example, diagnostics, as well as for therapeutics and prophylaxis.

[0240] In research, such nucleic acid molecules may be used to specifically modulate the synthesis of a C1S protein in cells (e.g. in vitro cell cultures) and animal models thereby facilitating functional analysis of the target or an appraisal of its usefulness as a target for therapeutic intervention. Typically, the target modulation is achieved by degrading or inhibiting the mRNA corresponding to the protein, thereby preventing protein formation or by degrading or inhibiting a modulator of the gene or mRNA producing the protein.

[0241] If employing the nucleic acid molecules of the invention in research or diagnostics, the target nucleic acid may be a cDNA or a synthetic nucleic acid derived from DNA or RNA.

[0242] Methods of Detection or Diagnosis

[0243] Further encompassed by the present invention is a method for diagnosing a neurological disease in a patient suspected of a having a neurological disease, said method comprising the steps of
[0244] a) determining the amount of one or more C1S nucleic acids, such as C1S mRNA or cDNA derived from C1S mRNA, in a sample from the subject, wherein the determination comprises contacting the sample with one or more oligonucleotides of the present invention,
[0245] b) comparing the amount determined in step a) to a reference amount, and
[0246] c) diagnosing whether the subject suffers from the neurological disease, or not, based on the results of step b).

[0247] In some embodiments, the method of diagnosing a neurological disease is an in vitro method.

[0248] The term “neurological disease” has been defined elsewhere herein. The definition applies accordingly. In some embodiments, the neurological disease to be diagnosed is a tauopathy, such as Alzheimer's disease. In some embodiments, the neurological disease to be diagnosed is schizophrenia.

[0249] The term “sample” refers to a sample of a body fluid, to a sample of separated cells or to a sample from a tissue or an organ. Samples of body fluids can be obtained by well-known techniques and include samples of blood, plasma, serum, urine, lymphatic fluid, sputum, ascites, saliva, and lacrimal fluid. In some embodiments, the sample is a cerebrospinal fluid sample.

[0250] Tissue or organ samples may be obtained from any tissue or organ by, e.g., biopsy. In some embodiments, the sample is a neural tissue sample, such as a brain tissue sample or spinal cord sample.

[0251] In some embodiments, the sample comprises neuron, astrocytes, oligodendrocytes, and/or microglia cells.

[0252] The subject may be a mammal. In some embodiments, the subject is a human. In some embodiments, the subject is a human. In some embodiments, the subject is a cynomolgus monkey.

[0253] In step a) of the aforementioned method, the amount of C1S nucleic acid present in the sample shall be determined. The C1S nucleic acid to be determined shall be a nucleic acid encoding a C1S protein. In some embodiments, the C1S nucleic acid is mammalian C1S nucleic acid. In some embodiments, the C1S nucleic acid is a human C1S nucleic acid.

[0254] The C1S nucleic acid may for example be a gene, a RNA, a mRNA, and pre-mRNA, a mature mRNA or a cDNA sequence. In an embodiment, the nucleic acid is a C1S mRNA, such as. In another embodiment, the C1S nucleic acid is cDNA derived from a C1S mRNA.

[0255] In step b) of aforementioned method, the amount of the C1S nucleic acid shall be compared to a reference, i.e. to a reference amount. The terms “reference amount” or “reference” are well understood by the skilled person. Suitable reference amounts can, in principle, be calculated for a cohort of subjects based on the average or mean values for a given biomarker by applying standard methods of statistics. A suitable reference shall allow for the diagnosis of the neurological disease. Accordingly, the reference shall allow for differentiating between a patient suffering from a neurological disease and a subject who is not suffering from a neurological disease. In some embodiments, the reference is a predetermined value.

[0256] In some embodiments, an amount of the C1S transcript larger than the reference amount is indicative for a patient suffering from a neurological disease, whereas an amount of the C1S transcript lower than the reference amount is indicative for a patient not suffering from neurological disease.

[0257] The determination of the amount of the one or more nucleic acids in step a) shall comprise contacting the sample with one or more oligonucleotides of the present invention. For example, the sample is contacted with said one or more oligonucleotides under conditions, which allow for the hybridization of said one or more oligonucleotides to the one or more C1S nucleic acids present in the sample (such as the C1S mRNA), thereby forming duplexes of said oligonucleotides and said C1S nucleic acids. In some embodiments, the amount of the one or more C1S nucleic acids is determined by determining the amount of the formed duplexes, e.g. via a detectable label. Accordingly, the one or more oligonucleotides to be used in the above method may comprise a detectable label.

[0258] Further encompassed by the present invention is a method for detecting one or more C1S nucleic acids in a sample, for example, in a sample as defined above. The method may comprise contacting the sample with one or more oligonucleotides of the present invention as described above. In some embodiments, the sample is from a patient having or suspected of a having a neurological disease.

[0259] Also encompassed by the present invention is an in vivo or in vitro method for modulating C1S expression in a target cell which is expressing C1S, said method comprising administering a nucleic acid molecule, conjugate compound or pharmaceutical composition of the invention in an effective amount to said cell.

[0260] In some embodiments, the target cell, is a mammalian cell in particular a human cell. The target cell may be an in vitro cell culture or an in vivo cell forming part of a tissue in a mammal. In preferred embodiments, the target cell is present in the brain. The target cell may be a brain cell. In some embodiments, the brain cell is selected from the group consisting of a neuron and a microglia cell.

[0261] One aspect of the present invention is related to the nucleic acid molecules or pharmaceutical compositions of the invention for use as a medicament.

[0262] In an aspect of the invention, the C1S inhibitor, such as a nucleic acid molecule or pharmaceutical composition of the invention is capable of reducing the amount of C1S in a cell expressing C1S.

[0263] For example, a nucleic acid molecule that inhibits C1S expression may reduce the C1S protein in an affected cell by at least 50% (e.g., 50-60%), or at least 60% (e.g., 60-70%), or at least 70% (e.g., 70-80%), at least 80% (e.g., 80-90%), or at least 90% (e.g., 90-95%) reduction compared to controls. The controls may be untreated cells or animals, or cells or animals treated with an appropriate control.

[0264] Inhibition of C1S expression may be measured by RT-qPCR, e.g. as described in the Materials and Methods section.

[0265] Due to the decrease of C1S levels, the nucleic acid molecules or pharmaceutical compositions of the present invention can be used to inhibit development of or in the treatment of neurological diseases.

[0266] Accordingly, one aspect of the present invention is related to use of an C1S inhibitor, such as the nucleic acid molecule or pharmaceutical compositions of the invention to decrease C1S protein in an individual having or susceptible to a neurological disease.

[0267] The subject to be treated with the C1S inhibitor, such as the nucleic acid molecules or pharmaceutical compositions of the invention (or who prophylactically receives nucleic acid molecules or pharmaceutical compositions of the present invention) is preferably a human, more preferably a human patient who has a neurological diseases, even more preferably a human patient having a tauopathy, even more preferably a human patient having Alzheimer's disease. In some embodiments, the human patient has schizophrenia.

[0268] Accordingly, the present invention relates to a method of treating neurological diseases, wherein the method comprises administering an effective amount of a C1S inhibitor, such as a nucleic acid molecule or pharmaceutical composition of the invention. The present invention further relates to a method of preventing a neurological disease. In one embodiment, the C1S inhibitors of the present invention is not intended for the treatment of a neurological disease, only its prevention.

[0269] In some embodiments, the subject to be treated does not have a cardiovascular disorder or disease (e.g., as described in WO 2014/089121). In some embodiments, the subject to be treated does not require treatment for pain (e.g., as described in WO 2005/060667).

[0270] The invention also provides for the use of a C1S inhibitor, such as nucleic acid molecule or a pharmaceutical composition of the invention for the manufacture of a medicament, in particular a medicament for use in the treatment of a neurological disease. In preferred embodiments, the medicament is manufactured in a dosage form for intrathecal or intracranial administration.

[0271] The invention also provides for the use of the nucleic acid molecule or the pharmaceutical composition of the invention for the manufacture of a medicament wherein the medicament is in a dosage form for intravenous administration.

[0272] Kits

[0273] The invention also provides a kit containing the C1S inhibitor of the present invention, such as the nucleic acid molecule or pharmaceutical composition of the present invention, and instructions for administering the C1S inhibitor. The instructions may indicate that the C1S inhibitor may be used for the treatment of a neurological disease or neurodegenerative disorder as referred to herein, such as Alzheimer's disease or Schizophrenia.

[0274] The term “kit” as used herein refers to a packaged product comprising components with which to administer the C1S inhibitor of the present invention. The kit may comprise a box or container that holds the components of the kit. The kit can also include instructions for administering the C1S inhibitor of the present invention of the invention.

### EXAMPLES

[0275] Materials and Methods

### Example 1: Testing In Vitro Efficacy of Antisense Oligonucleotides Targeting C1S in Primary Mouse Hepatocytes

[0276] Cells were maintained in a humidified incubator as recommended by the supplier. The vendor and recommended culture conditions are reported in Table 5.

TABLE 5
Cell culture details.

| | | Culture | Seeding density | Incub. time | Incub. time |
|---|---|---|---|---|---|
| Cell Line | Vendor | Condition | (cells/well) | before oligo (hrs) | with oligo (hrs) |
| mouse | Minerva | WME (Sigma | 25000 | 24 | 72 |
| hepatocytes | Imaging | #W1878) w/FBS: | | | |
| | | complemented | | | |
| | | with 1× | | | |
| | | Pen/Strep/ | | | |
| | | Glutamine | | | |
| | | (freshly added), | | | |
| | | 10% (v/v) | | | |
| | | FBS (Sigma | | | |
| | | F7524), non-heat | | | |
| | | inactivated. | | | |

[0277] For assays, cells were seeded in a 96-multi well plate in culture media and incubated as reported in Table 5 before addition of oligonucleotides dissolved in PBS. The seeding density of the cells is reported in Table 5.

[0278] Oligonucleotides were added at the concentrations reported in Table 7. The cells were harvested 72 hours after the addition of oligonucleotides (see Table 5). RNA was extracted using the RNeasy 96 kit (Qiagen) according to the manufacturer's instructions and eluted in 200 μL of water. The RNA was subsequently heated to 90° C. for one minute.

[0279] For gene expressions analysis, One Step RT-qPCR was performed using gScript™ XLT One-Step RT-qPCR ToughMix®, Low ROX™ (Quantabio) in a duplex set up. The primer assays used for qPCR are collated in Table 6 for both target and endogenous control.

TABLE 6
qPCR primer-probe details.

| Endogen contr. | Endog. contr. | Endogen. contr. | Target | Target | Target |
|---|---|---|---|---|---|
| assay | vendor | fluorophore | assay | vendor | fluorophore |
| RPLP0: | IDT | HEX-ZEN | C1S: | IDT | 6-FAM/ZEN/IBFQ |
| MmPT5843894205 | | | Mm.PT.58.8983990 | | |

[0280] The relative mouse C1s1 and mouse C1s2 mRNA expression level in Table 7 is shown as percent of control (PBS-treated cells). More information on the tested compounds can be found in Table 8.

TABLE 7
mRNA expression level (% of PBS-treated cells).

| | | C1RS mRNA | | | C1RS mRNA | | | C1RS mRNA |
|---|---|---|---|---|---|---|---|---|
| | | qPCR SP | | | qPCR SP | | | qPCR SP |
| | | probe1 mouse | | | probe1 mouse | | | probe1 mouse |
| | | hepatocytes | | | hepatocytes | | | hepatocytes |
| CMP ID | | C1S: | CMP ID | | C1S: | CMP ID | Conc | C1S: |
| NO | Conc | AP015386 | NO | Conc | AP015386 | NO 2 | 2 | AP0153862 |
| 283_1 | 0.3 | 63.8 | 379_1 | 0.3 | 96 | 471_1 | 0.3 | 38.8 |
| 284_1 | 0.06 | 104 | 380_1 | 0.06 | 90 | 472_1 | 0.06 | 121 |
| 284_1 | 0.3 | 78.7 | 380_1 | 0.3 | 64.2 | 472_1 | 0.3 | 58 |
| 285_1 | 0.06 | 75 | 381_1 | 0.06 | 62.9 | 473_1 | 0.06 | 115 |
| 285_1 | 0.3 | 47.5 | 381_1 | 0.3 | 108 | 473_1 | 0.3 | 80.2 |
| 286_1 | 0.3 | 31.1 | 382_1 | 0.3 | 80.4 | 474_1 | 0.06 | 68.3 |
| 287_1 | 0.3 | 58.4 | 383_1 | 0.06 | 88.7 | 474_1 | 0.3 | 46.1 |
| 288_1 | 0.06 | 101 | 383_1 | 0.3 | 109 | 475_1 | 0.06 | 86.2 |
| 288_1 | 0.3 | 74.1 | 384_1 | 0.06 | 65.2 | 475_1 | 0.3 | 48.5 |
| 289_1 | 0.3 | 66.7 | 384_1 | 0.3 | 46.3 | 476_1 | 0.06 | 78.3 |
| 290_1 | 0.3 | 61.1 | 385_1 | 0.06 | 132 | 476_1 | 0.3 | 41.8 |
| 291_1 | 0.3 | 75.8 | 385_1 | 0.3 | 116 | 477_1 | 0.06 | 76.7 |
| 292_1 | 0.06 | 85.3 | 386_1 | 0.06 | 103 | 477_1 | 0.3 | 39.2 |
| 292_1 | 0.3 | 78.9 | 386_1 | 0.3 | 110 | 478_1 | 0.3 | 96 |
| 293_1 | 0.06 | 103 | 387_1 | 0.3 | 63.7 | 479_1 | 0.06 | 129 |
| 293_1 | 0.3 | 70.3 | 388_1 | 0.06 | 114 | 479_1 | 0.3 | 83 |
| 294_1 | 0.06 | 94.7 | 388_1 | 0.3 | 92.3 | 480_1 | 0.06 | 92 |
| 294_1 | 0.3 | 76.8 | 389_1 | 0.3 | 59.8 | 480_1 | 0.3 | 53.5 |
| 295_1 | 0.06 | 45.9 | 390_1 | 0.06 | 108 | 481_1 | 0.06 | 115 |
| 295_1 | 0.3 | 17.9 | 390_1 | 0.3 | 48.5 | 481_1 | 0.3 | 101 |
| 296_1 | 0.06 | 86.6 | 391_1 | 0.3 | 60.9 | 482_1 | 0.3 | 87.4 |
| 296_1 | 0.3 | 79.2 | 392_1 | 0.06 | 95.7 | 483_1 | 0.06 | 46.5 |
| 297_1 | 0.06 | 97.7 | 392_1 | 0.3 | 52.9 | 483_1 | 0.3 | 13.2 |
| 297_1 | 0.3 | 101 | 393_1 | 0.06 | 78.6 | 484_1 | 0.06 | 87.4 |
| 298_1 | 0.06 | 73.2 | 393_1 | 0.3 | 47 | 484_1 | 0.3 | 41.8 |
| 298_1 | 0.3 | 77.3 | 394_1 | 0.06 | 63.6 | 485_1 | 0.06 | 35.1 |
| 299_1 | 0.06 | 87.5 | 394_1 | 0.3 | 43.9 | 485_1 | 0.3 | 11.8 |
| 299_1 | 0.3 | 98.1 | 395_1 | 0.06 | 89.6 | 486_1 | 0.06 | 27.8 |
| 300_1 | 0.06 | 128 | 395_1 | 0.3 | 44.5 | 486_1 | 0.3 | 8 |
| 300_1 | 0.3 | 125 | 396_1 | 0.06 | 103 | 487_1 | 0.06 | 54.1 |
| 301_1 | 0.06 | 90.9 | 396_1 | 0.3 | 72 | 487_1 | 0.3 | 16.4 |
| 301_1 | 0.3 | 43.7 | 397_1 | 0.06 | 66.7 | 488_1 | 0.06 | 66.3 |
| 302_1 | 0.3 | 69.8 | 397_1 | 0.3 | 52 | 488_1 | 0.3 | 31 |
| 303_1 | 0.06 | 56 | 398_1 | 0.3 | 56.1 | 489_1 | 0.06 | 59.6 |
| 303_1 | 0.3 | 17 | 399_1 | 0.06 | 69 | 489_1 | 0.3 | 25 |
| 304_1 | 0.3 | 32.8 | 399_1 | 0.3 | 44.7 | 490_1 | 0.3 | 25.6 |
| 305_1 | 0.06 | 106 | 400_1 | 0.06 | 97.7 | 491_1 | 0.06 | 40.1 |
| 305_1 | 0.3 | 110 | 400_1 | 0.3 | 67.4 | 491_1 | 0.3 | 12.7 |
| 306_1 | 0.3 | 97.2 | 401_1 | 0.06 | 99.3 | 492_1 | 0.06 | 30.4 |
| 307_1 | 0.06 | 81.1 | 401_1 | 0.3 | 52.8 | 492_1 | 0.3 | 5 |
| 307_1 | 0.3 | 78.8 | 402_1 | 0.06 | 103 | 493_1 | 0.06 | 30.3 |
| 308_1 | 0.06 | 94.7 | 402_1 | 0.3 | 91.4 | 493_1 | 0.3 | 9.2 |
| 308_1 | 0.3 | 62.2 | 403_1 | 0.06 | 87.4 | 494_1 | 0.06 | 85.6 |
| 309_1 | 0.3 | 20.6 | 403_1 | 0.3 | 74.1 | 494_1 | 0.3 | 61 |
| 310_1 | 0.06 | 68.1 | 404_1 | 0.3 | 66.8 | 495_1 | 0.3 | 89.3 |
| 310_1 | 0.3 | 21.1 | 405_1 | 0.06 | 96.5 | 496_1 | 0.3 | 70.1 |
| 311_1 | 0.06 | 64.1 | 405_1 | 0.3 | 102 | 497_1 | 0.06 | 80.5 |
| 311_1 | 0.3 | 30.2 | 406_1 | 0.3 | 90.1 | 497_1 | 0.3 | 76.5 |
| 312_1 | 0.3 | 13.3 | 407_1 | 0.3 | 49.8 | 498_1 | 0.06 | 81.9 |
| 313_1 | 0.06 | 86 | 408_1 | 0.06 | 66.5 | 498_1 | 0.3 | 50.2 |
| 313_1 | 0.3 | 77.1 | 408_1 | 0.3 | 36.1 | 499_1 | 0.06 | 95.1 |
| 314_1 | 0.3 | 44.7 | 409_1 | 0.3 | 48.6 | 499_1 | 0.3 | 39.7 |
| 315_1 | 0.06 | 74.2 | 410_1 | 0.06 | 83.1 | 500_1 | 0.3 | 27.6 |
| 315_1 | 0.3 | 25.8 | 410_1 | 0.3 | 49.2 | 501_1 | 0.06 | 105 |
| 316_1 | 0.06 | 59.7 | 411_1 | 0.06 | 110 | 501_1 | 0.3 | 85.6 |
| 316_1 | 0.3 | 30.5 | 411_1 | 0.3 | 89.1 | 502_1 | 0.3 | 68.8 |
| 317_1 | 0.06 | 84.9 | 412_1 | 0.06 | 70.2 | 503_1 | 0.06 | 81.1 |
| 317_1 | 0.3 | 49.8 | 412_1 | 0.3 | 37.6 | 503_1 | 0.3 | 52.2 |
| 318_1 | 0.06 | 113 | 413_1 | 0.06 | 74 | 504_1 | 0.06 | 96.1 |
| 318_1 | 0.3 | 84.8 | 413_1 | 0.3 | 35.1 | 504_1 | 0.3 | 42.5 |
| 319_1 | 0.06 | 74.3 | 414_1 | 0.06 | 106 | 505_1 | 0.06 | 94.6 |
| 319_1 | 0.3 | 38.5 | 414_1 | 0.3 | 72.5 | 505_1 | 0.3 | 64 |
| 320_1 | 0.06 | 68.8 | 415_1 | 0.06 | 87 | 506_1 | 0.06 | 94.6 |
| 320_1 | 0.3 | 67.3 | 415_1 | 0.3 | 40.3 | 506_1 | 0.3 | 69.9 |
| 321_1 | 0.3 | 21.3 | 416_1 | 0.3 | 17.3 | 507_1 | 0.06 | 122 |
| 322_1 | 0.06 | 83.3 | 417_1 | 0.06 | 59.4 | 507_1 | 0.3 | 84.2 |
| 322_1 | 0.3 | 55.1 | 417_1 | 0.3 | 29.3 | 508_1 | 0.06 | 97.7 |
| 323_1 | 0.3 | 40.9 | 418_1 | 0.3 | 16.7 | 508_1 | 0.3 | 90 |
| 324_1 | 0.3 | 24.1 | 419_1 | 0.06 | 70.3 | 509_1 | 0.06 | 111 |
| 325_1 | 0.06 | 46.5 | 419_1 | 0.3 | 33 | 509_1 | 0.3 | 110 |
| 325_1 | 0.3 | 17.8 | 420_1 | 0.3 | 33.4 | 510_1 | 0.06 | 101 |
| 326_1 | 0.3 | 23.9 | 421_1 | 0.06 | 59.6 | 510_1 | 0.3 | 56.2 |
| 327_1 | 0.3 | 39.9 | 421_1 | 0.3 | 14 | 511_1 | 0.3 | 48.2 |
| 328_1 | 0.3 | 94.5 | 422_1 | 0.3 | 23.7 | 512_1 | 0.06 | 75.8 |
| 329_1 | 0.3 | 21.7 | 423_1 | 0.3 | 38 | 512_1 | 0.3 | 53.8 |
| 330_1 | 0.06 | 109 | 424_1 | 0.3 | 45.3 | 513_1 | 0.06 | 76.9 |
| 330_1 | 0.3 | 90 | 425_1 | 0.06 | 95.1 | 513_1 | 0.3 | 79.7 |
| 331_1 | 0.06 | 98.3 | 425_1 | 0.3 | 63.2 | 514_1 | 0.3 | 77.3 |
| 331_1 | 0.3 | 108 | 426_1 | 0.06 | 106 | 515_1 | 0.06 | 83.2 |
| 332_1 | 0.06 | 105 | 426_1 | 0.3 | 85.5 | 515_1 | 0.3 | 55.8 |
| 332_1 | 0.3 | 82.5 | 427_1 | 0.06 | 51.7 | 516_1 | 0.06 | 110 |
| 333_1 | 0.06 | 58.2 | 427_1 | 0.3 | 18.8 | 516_1 | 0.3 | 62 |
| 333_1 | 0.3 | 37.1 | 428_1 | 0.06 | 46.3 | 517_1 | 0.06 | 53.5 |
| 334_1 | 0.06 | 62.4 | 428_1 | 0.3 | 17.6 | 517_1 | 0.3 | 35.9 |
| 334_1 | 0.3 | 17.2 | 429_1 | 0.06 | 60.5 | 518_1 | 0.06 | 96.4 |
| 335_1 | 0.06 | 86.4 | 429_1 | 0.3 | 17.5 | 518_1 | 0.3 | 107 |
| 335_1 | 0.3 | 46.8 | 430_1 | 0.3 | 40.1 | 519_1 | 0.06 | 119 |
| 336_1 | 0.06 | 82.6 | 431_1 | 0.3 | 62.6 | 519_1 | 0.3 | 87 |
| 336_1 | 0.3 | 49.3 | 432_1 | 0.06 | 79.7 | 520_1 | 0.06 | 96.1 |
| 337_1 | 0.06 | 73.4 | 432_1 | 0.3 | 57 | 520_1 | 0.3 | 105 |
| 337_1 | 0.3 | 99.2 | 433_1 | 0.06 | 81.3 | 521_1 | 0.06 | 88.8 |
| 338_1 | 0.3 | 57.7 | 433_1 | 0.3 | 47.6 | 521_1 | 0.3 | 103 |
| 339_1 | 0.06 | 81.1 | 434_1 | 0.3 | 83.5 | 522_1 | 0.06 | 104 |
| 339_1 | 0.3 | 51.2 | 435_1 | 0.06 | 33.4 | 522_1 | 0.3 | 119 |
| 340_1 | 0.06 | 86.1 | 435_1 | 0.3 | 15.9 | 523_1 | 0.06 | 115 |
| 340_1 | 0.3 | 55.8 | 436_1 | 0.06 | 45.4 | 523_1 | 0.3 | 97.9 |
| 341_1 | 0.06 | 74.1 | 436_1 | 0.3 | 25.9 | 524_1 | 0.06 | 127 |
| 341_1 | 0.3 | 45.1 | 437_1 | 0.06 | 36.6 | 524_1 | 0.3 | 84.4 |
| 342_1 | 0.3 | 82.7 | 437_1 | 0.3 | 12.9 | 525_1 | 0.06 | 39.9 |
| 343_1 | 0.06 | 65.8 | 438_1 | 0.06 | 121 | 525_1 | 0.3 | 32.9 |
| 343_1 | 0.3 | 55.5 | 438_1 | 0.3 | 94.9 | 526_1 | 0.3 | 22.4 |
| 344_1 | 0.06 | 69.3 | 439_1 | 0.06 | 66.3 | 527_1 | 0.06 | 72.6 |
| 344_1 | 0.3 | 55.3 | 439_1 | 0.3 | 56 | 527_1 | 0.3 | 30.4 |
| 345_1 | 0.06 | 78.8 | 440_1 | 0.06 | 84.3 | 528_1 | 0.3 | 39.2 |
| 345_1 | 0.3 | 48.3 | 440_1 | 0.3 | 55.7 | 529_1 | 0.06 | 103 |
| 346_1 | 0.06 | 103 | 441_1 | 0.06 | 92.1 | 529_1 | 0.3 | 85.8 |
| 346_1 | 0.3 | 56.9 | 441_1 | 0.3 | 63.5 | 530_1 | 0.06 | 95.7 |
| 347_1 | 0.3 | 59.2 | 442_1 | 0.3 | 9.3 | 530_1 | 0.3 | 85 |
| 348_1 | 0.06 | 67.9 | 443_1 | 0.06 | 58 | 531_1 | 0.3 | 79.4 |
| 348_1 | 0.3 | 43.5 | 443_1 | 0.3 | 26.3 | 532_1 | 0.3 | 95.3 |
| 349_1 | 0.06 | 97.4 | 444_1 | 0.06 | 40.4 | 533_1 | 0.06 | 95.4 |
| 349_1 | 0.3 | 66.2 | 444_1 | 0.3 | 9 | 533_1 | 0.3 | 47.2 |
| 350_1 | 0.06 | 91.8 | 445_1 | 0.3 | 60.8 | 534_1 | 0.06 | 103 |
| 350_1 | 0.3 | 93.3 | 446_1 | 0.3 | 82.9 | 534_1 | 0.3 | 66.4 |
| 351_1 | 0.06 | 98.5 | 447_1 | 0.3 | 78 | 535_1 | 0.3 | 47.2 |
| 351_1 | 0.3 | 62.9 | 448_1 | 0.06 | 53.8 | 536_1 | 0.06 | 98.3 |
| 352_1 | 0.06 | 74.5 | 448_1 | 0.3 | 23.4 | 536_1 | 0.3 | 63.2 |
| 352_1 | 0.3 | 55.6 | 449_1 | 0.06 | 68.1 | 537_1 | 0.3 | 73.6 |
| 353_1 | 0.3 | 22.7 | 449_1 | 0.3 | 26.4 | 538_1 | 0.06 | 98.9 |
| 354_1 | 0.06 | 75.1 | 450_1 | 0.06 | 94.8 | 538_1 | 0.3 | 80 |
| 354_1 | 0.3 | 53.9 | 450_1 | 0.3 | 33.6 | 539_1 | 0.3 | 84.7 |
| 355_1 | 0.3 | 19.3 | 451_1 | 0.06 | 88.7 | 540_1 | 0.3 | 51.5 |
| 356_1 | 0.06 | 61.5 | 451_1 | 0.3 | 72.1 | 541_1 | 0.06 | 101 |
| 356_1 | 0.3 | 28.4 | 452_1 | 0.06 | 100 | 541_1 | 0.3 | 68.2 |
| 357_1 | 0.06 | 74.6 | 452_1 | 0.3 | 67.6 | 542_1 | 0.3 | 45 |
| 357_1 | 0.3 | 55.1 | 453_1 | 0.06 | 71.7 | 543_1 | 0.06 | 69.4 |
| 358_1 | 0.06 | 58.1 | 453_1 | 0.3 | 35.4 | 543_1 | 0.3 | 60.1 |
| 358_1 | 0.3 | 37.8 | 454_1 | 0.06 | 104 | 544_1 | 0.3 | 96.3 |
| 359_1 | 0.3 | 53.4 | 454_1 | 0.3 | 83 | 545_1 | 0.3 | 76.8 |
| 360_1 | 0.06 | 87.5 | 455_1 | 0.06 | 90.6 | 546_1 | 0.06 | 18.6 |
| 360_1 | 0.3 | 67.2 | 455_1 | 0.3 | 74.6 | 546_1 | 0.3 | 5.1 |
| 361_1 | 0.3 | 44.3 | 456_1 | 0.06 | 116 | 547_1 | 0.06 | 65.5 |
| 362_1 | 0.3 | 92.2 | 456_1 | 0.3 | 56 | 547_1 | 0.3 | 32.8 |
| 363_1 | 0.06 | 77.8 | 457_1 | 0.06 | 95.6 | 548_1 | 0.06 | 60.9 |
| 363_1 | 0.3 | 65.8 | 457_1 | 0.3 | 57.7 | 548_1 | 0.3 | 35 |
| 364_1 | 0.06 | 80.3 | 458_1 | 0.06 | 77 | 549_1 | 0.06 | 115 |
| 364_1 | 0.3 | 65.8 | 458_1 | 0.3 | 39.5 | 549_1 | 0.3 | 84.7 |
| 365_1 | 0.3 | 67.3 | 459_1 | 0.3 | 79.3 | 550_1 | 0.3 | 23 |
| 366_1 | 0.3 | 40.4 | 460_1 | 0.06 | 90 | 551_1 | 0.06 | 21.1 |
| 367_1 | 0.3 | 44.9 | 460_1 | 0.3 | 60.6 | 551_1 | 0.3 | 7.7 |
| 368_1 | 0.3 | 38.7 | 461_1 | 0.06 | 118 | 552_1 | 0.06 | 26.5 |
| 369_1 | 0.3 | 27.1 | 461_1 | 0.3 | 98.2 | 552_1 | 0.3 | 4.8 |
| 370_1 | 0.06 | 84.3 | 462_1 | 0.06 | 65.7 | 553_1 | 0.06 | 31.8 |
| 370_1 | 0.3 | 65.4 | 462_1 | 0.3 | 34.6 | 553_1 | 0.3 | 8.3 |
| 371_1 | 0.06 | 97.3 | 463_1 | 0.06 | 102 | 554_1 | 0.06 | 28.4 |
| 371_1 | 0.3 | 62 | 463_1 | 0.3 | 73.8 | 554_1 | 0.3 | 5.4 |
| 372_1 | 0.3 | 49.9 | 464_1 | 0.06 | 131 | 555_1 | 0.3 | 13.1 |
| 373_1 | 0.06 | 98.1 | 464_1 | 0.3 | 107 | 556_1 | 0.06 | 79.1 |
| 373_1 | 0.3 | 55.2 | 465_1 | 0.06 | 92.6 | 556_1 | 0.3 | 33.1 |
| 374_1 | 0.06 | 102 | 465_1 | 0.3 | 68 | 557_1 | 0.06 | 38.2 |
| 374_1 | 0.3 | 87 | 466_1 | 0.3 | 76.4 | 557_1 | 0.3 | 12.6 |
| 375_1 | 0.06 | 76.5 | 467_1 | 0.06 | 83 | 558_1 | 0.06 | 42.2 |
| 375_1 | 0.3 | 32 | 467_1 | 0.3 | 40.1 | 558_1 | 0.3 | 12.8 |
| 376_1 | 0.06 | 69.5 | 468_1 | 0.3 | 35.8 | 559_1 | 0.06 | 17.9 |
| 376_1 | 0.3 | 51.6 | 469_1 | 0.06 | 71.9 | 559_1 | 0.3 | 3.3 |
| 377_1 | 0.06 | 71.5 | 469_1 | 0.3 | 31.8 | 560_1 | 0.3 | 16.2 |
| 377_1 | 0.3 | 27.2 | 470_1 | 0.06 | 80 | 561_1 | 0.06 | 17.1 |
| 378_1 | 0.06 | 98.9 | 470_1 | 0.3 | 40.5 | 561_1 | 0.3 | 4.1 |
| 378_1 | 0.3 | 56.6 | 471_1 | 0.06 | 68.8 | 562_1 | 0.06 | 95.3 |
| | | | | | | 562_1 | 0.3 | 57.2 |

[0281] From Table 7 it can be taken that the C1S pool is capable of reducing C1S mRNA efficiently at different concentrations.

[0282] The invention provides the following oligonucleotide compounds (Table 8):

TABLE 8
Oligonucleotide compounds

| SEQ | | | SEQ | | | | | |
|---|---|---|---|---|---|---|---|---|
| ID | | | ID | | CMP | | | |
| NO | Motif | Design | NO: | Compound | ID NO | ΔG° | start_C1s1 | start_C1s2 |
| 27 | AAAGTTGTTACCTTCA | 4-8-4 | 307 | AAAGttgttaccTTCA | 283 1 | −19.6 | 88 | |
| 28 | CAAAGCTTCTCTCTTTAA | 2-12-4 | 308 | CAaagcttctctctTTAA | 284_1 | −19.3 | 115 | |
| 29 | TTCCTTCATCAAAGCTT | 3-11-3 | 309 | TTCcttcatcaaagCTT | 285_1 | −20.8 | 125 | |
| 30 | CTTTCACAAATTGCCTC | 2-12-3 | 310 | CTttcacaaattgcCTC | 286_1 | −20.1 | 305 | |
| 31 | AAGGTATCTTCCCATA | 3-11-2 | 311 | AAGgtatottcccaTA | 287_1 | −19.9 | 336 | |
| 32 | CCCTTACTTTTCTOGA | 2-12-2 | 312 | CCcttacttttctcGA | 288_1 | −21.1 | 383 | |
| 33 | AGATATGCTTTCCCTTA | 2-12-3 | 313 | AGatatgctttcccTTA | 289_1 | −21.2 | 393 | |
| 34 | TTGACAAGCTATTACA | 4-8-4 | 314 | TTGAcaagctatTACA | 290_1 | −20 | 581 | |
| 35 | CCAATATTCCTACAATT | 3-10-4 | 315 | CCAatattcctacAATT | 291_1 | −19.9 | 724 | |
| 36 | CCAGCCCTCAATTAAC | 2-12-2 | 316 | CCagccctcaattaAC | 292_1 | −20.2 | 759 | |
| 37 | GATTTAGACTAACTTC | 4-8-4 | 317 | GATTtagactaaCTTC | 293_1 | −18.1 | 780 | |
| 38 | GATACCATGACACCCTC | 2-13-2 | 318 | GAtaccatgacacccTC | 294_1 | −21.8 | 804 | |
| 39 | CTTTATCTGACAAATACA | 4-10-4 | 319 | CTTTatctgacaaaTACA | 295_1 | −20.4 | 917 | |
| 40 | TCACTTACCACATCCCT | 2-13-2 | 320 | TCacttaccacatccCT | 296_1 | −22.8 | 1019 | 51 |
| 41 | GATCACTTACCACATCC | 2-13-2 | 321 | GAtcacttaccacatCC | 297_1 | −21.5 | 1021 | 53 |
| 42 | CTGATCACTTACCACAT | 3-12-2 | 322 | CTGatcacttaccacAT | 298_1 | −20 | 1023 | 55 |
| 43 | ACCTGATCACTTACCAC | 3-12-2 | 323 | ACCtgatcacttaccAC | 299_1 | −21.8 | 1025 | 57 |
| 44 | ATACCTGATCACTTAC | 4-10-2 | 324 | ATACctgatcacttAC | 300_1 | −18 | 1028 | 60 |
| 45 | GGAAATCACATACAAC | 4-8-4 | 325 | GGAAatcacataCAAC | 301_1 | −17.7 | 1176 | 208 |
| 46 | GAATAAACAAATATATACA | 4-11-4 | 326 | GAATaaacaaatataTACA | 302_1 | −16.3 | 1252 | 284 |
| 47 | AACAGGACCAAACACCT | 3-10-4 | 327 | AACaggaccaaacACCT | 303_1 | −22.4 | 1362 | |
| 48 | TTTCACGACGTCATT | 4-7-4 | 328 | TTTCacgacgtCATT | 304_1 | −19.8 | 1458 | 491 |
| 49 | GACTTCAATGTCCCAA | 3-10-3 | 329 | GACttcaatgtccCAA | 305_1 | −21 | 1475 | 508 |
| 50 | CCTAAATCCTCTCATTC | 2-13-2 | 330 | CCtaaatcctctcatTC | 306_1 | −19.9 | 1625 | 657 |
| 51 | ACACACAGCCCCCTAAA | 2-13-2 | 331 | ACacacagccccctaAA | 307_1 | −22 | 1636 | 668 |
| 52 | GCAGAACCTTTACTCC | 2-12-2 | 332 | GCagaacctttactCC | 308_1 | −21.5 | 1803 | 835 |
| 53 | TGAAACTCTTCTATAAT | 4-9-4 | 333 | TGAAactcttctaTAAT | 309_1 | −17.6 | 1931 | 963 |
| 54 | ACTGAAACTCTTCTATAA | 3-12-3 | 334 | ACTgaaactcttctaTAA | 310_1 | −17.7 | 1932 | 964 |
| 55 | ACTGAAACTCTTCTATA | 2-11-4 | 335 | ACtgaaactottcTATA | 311_1 | −18.2 | 1933 | 965 |
| 56 | CGTAAACCGTTCTTC | 3-8-4 | 336 | CGTaaaccgttCTTC | 312_1 | −20.6 | 1997 | |
| 57 | CGGATGCCTTACCTA | 2-11-2 | 337 | CGgatgccttaccTA | 313_1 | −20.6 | 2037 | |
| 58 | ATCCTCATTTCATGCAC | 3-12-2 | 338 | ATCctcatttcatgcAC | 314_1 | −20.3 | 2109 | |
| 59 | CGATAAAGTCACACAAA | 4-9-4 | 339 | CGATaaagtcacaCAAA | 315_1 | −18.7 | 2271 | 1302 |
| 60 | TGCTTTACCACCACTAA | 3-12-2 | 340 | TGCtttaccaccactAA | 316_1 | −21.8 | 2292 | 1323 |
| 61 | CATTATCTGCTTTACC | 3-10-3 | 341 | CATtatctgctttACC | 317_1 | −20.2 | 2300 | 1331 |
| 62 | TCTCAGTCTCATTATCT | 2-13-2 | 342 | TCtcagtctcattatCT | 318_1 | −19.2 | 2308 | 1339 |
| 63 | ACCATGCCGACCACAC | 2-12-2 | 343 | ACcatgccgaccacAC | 319_1 | −21.6 | 2393 | |
| 64 | GATCCGTATOTTTATA | 4-9-3 | 344 | GATCcgtatotttATA | 320_1 | −20.3 | 2414 | 1445 |
| 65 | GCGTTCTCTTTACTTC | 4-10-2 | 345 | GCGTtctctttactTC | 321_1 | −22,3 | 2540 | |
| 66 | ATAGCAACCATTTCACT | 3-12-2 | 346 | ATAgcaaccatttcaCT | 322_1 | −20.4 | 2574 | 1605 |
| 67 | TCGTTATTCCTTCTAC | 2-10-4 | 347 | TCgttattccttCTAC | 323_1 | −20.4 | 2626 | 1657 |
| 68 | TTCGTTATTCCTTCTA | 4-9-3 | 348 | TTCGttattcettCTA | 324_1 | −21.6 | 2627 | 1658 |
| 69 | TTCTTATTACTATCCAT | 4-11-2 | 349 | TTCTtattactatccAT | 325_1 | −18.1 | 2712 | 1743 |
| 70 | ATTTCTTATTACTATCCAT | 2-13-4 | 350 | ATttcttattactatCCAT | 326_1 | −21.9 | 2712 | 1743 |
| 71 | CATTTCTTATTACTATCC | 3-13-2 | 351 | CATttcttattactatCC | 327_1 | −19.8 | 2714 | 1745 |
| 72 | TAGCATTTCTTATTACTA | 2-14-2 | 352 | TAgcatttottattacTA | 328_1 | −17.4 | 2717 | 1748 |
| 73 | TTAGCATTTCTTATTAC | 4-9-4 | 353 | TTAGcatttcttaTTAC | 329_1 | −19.9 | 2719 | 1750 |
| 74 | CTATTTATATACCCCT | 3-11-2 | 354 | CTAtttatatacccCT | 330_1 | −19.6 | 2824 | |
| 75 | GCCCTCCTTTTAATTTT | 3-12-2 | 355 | GCCctccttttaattTT | 331_1 | −23.9 | 2861 | 1888 |
| 76 | CAGCCCTCCTTTTAATT | 2-13-2 | 356 | CAgccctccttttaaTT | 332_1 | −21.7 | 2863 | 1890 |
| 77 | GTGATTATCTTTTAATA | 4-9-4 | 357 | GTGAttatcttttAATA | 333_1 | −18.6 | 2976 | 2003 |
| 78 | AAGCATTCATTCACTAA | 4-10-3 | 358 | AAGCattcattcacTAA | 334_1 | −19.9 | 2999 | 2026 |
| 79 | ATCCTTTCAGACACAAA | 4-11-2 | 359 | ATCCtttcagacacaAA | 335_1 | −19.9 | 3018 | |
| 80 | CTGCTTATACATTCCTT | 2-13-2 | 360 | CTgcttatacattccTT | 336_1 | −19.2 | 3091 | 2118 |
| 81 | TCCTGCTTATACATTCC | 2-12-3 | 361 | TCctgcttatacatTCC | 337_1 | −22.4 | 3093 | 2120 |
| 82 | AGGCCTAACTTCATTTT | 2-12-3 | 362 | AGgcctaacttcatTTT | 338_1 | −20 | 3149 | |
| 83 | TTAGGACCTACTTTATA | 4-11-2 | 363 | TTAGgacctactttaTA | 339_1 | −20.2 | 3212 | 2239 |
| 84 | AACTATACAACACCCT | 3-10-3 | 364 | AACtatacaacacCCT | 340_1 | −19.6 | 3400 | 2427 |
| 85 | TACAAACTATACAACACCO | 4-13-2 | 365 | TACAaactatacaacacCC | 341_1 | −21.9 | 3401 | 2428 |
| 86 | GTACAAACTATACAACACC | 2-15-2 | 366 | GTacaaactatacaacaCC | 342_1 | −19.1 | 3402 | 2429 |
| 87 | GCGTACAAACTATAC | 4-7-4 | 367 | GCGTacaaactATAC | 343_1 | −19.9 | 3408 | 2435 |
| 88 | TTGCGTACAAACTAT | 3-8-4 | 368 | TTGcgtacaaaCTAT | 344_1 | −17.8 | 3410 | 2437 |
| 89 | CACCATGAAAACCCTAT | 4-11-2 | 369 | CACCatgaaaaccctAT | 345_1 | −21.6 | 3433 | |
| 90 | AATCTAAACTACTTTTCT | 4-10-4 | 370 | AATCtaaactacttTTCT | 346_1 | −19 | 3497 | 2524 |
| 91 | ATACAATCTAAACTACTTTT | 4-12-4 | 371 | ATACaatctaaactacTTTT | 347_1 | −19.5 | 3499 | 2526 |
| 92 | GAATACAATCTAAACTACT | 4-12-3 | 372 | GAATacaatctaaactACT | 348_1 | −18 | 3502 | 2529 |
| 93 | TACGAATACAATCTAA | 4-8-4 | 373 | TACGaatacaatCTAA | 349_1 | −16.5 | 3508 | 2535 |
| 94 | TCTACGAATACAATC | 4-7-4 | 374 | TCTAcgaatacAATC | 350_1 | −16.1 | 3511 | 2538 |
| 95 | CCCATATTTTAAAATCTAC | 2-14-3 | 375 | CCcatattttaaaatcTAC | 351_1 | −19.2 | 3521 | 2548 |
| 96 | CCCATATTTTAAAATCTA | 2-12-4 | 376 | CCcatattttaaaaTCTA | 352_1 | −19.9 | 3522 | 2549 |
| 97 | TTGATATTTTATACTACAT | 4-11-4 | 377 | TTGAtatittatactACAT | 353_1 | −19.9 | 3697 | |
| 98 | TAAATCTTAACACACTTTA | 4-11-4 | 378 | TAAAtcttaacacacTTTA | 354_1 | −18 | 3748 | 2775 |
| 99 | TAAATCTTAACACACTTT | 4-10-4 | 379 | TAAAtcttaacacaCTTT | 355_1 | −17.4 | 3749 | 2776 |
| 100 | AAATAAATCTTAACACACT | 4-11-4 | 380 | AAATaaatcttaacaCACT | 356_1 | −17.8 | 3751 | 2778 |
| 101 | TAAAATAAATCTTAACACACT | 3-14-4 | 381 | TAAaataaatcttaacaCACT | 357_1 | −18 | 3751 | 2778 |
| 102 | AGCAAGCAAAACACCTAC | 3-13-2 | 382 | AGCaagcaaaacacctAC | 358_1 | −20.5 | 3803 | 2830 |
| 103 | TCCTCAGATACCCTAT | 2-12-2 | 383 | TCctcagataccctAT | 359_1 | −19.6 | 3843 | 2870 |
| 104 | CAACGCTATAATTCCA | 2-10-4 | 384 | CAacgctataatTCCA | 360_1 | −20 | 3894 | 2922 |
| 105 | CACAACGCTATAATTCC | 4-10-3 | 385 | CACAacgctataatTCC | 361_1 | −22.1 | 3895 | 2923 |
| 106 | CTCACAACGCTATAAT | 4-10-2 | 386 | CTCAcaacgctataAT | 362_1 | −18.1 | 3898 | 2926 |
| 107 | TATGTGCTATCATTCCA | 2-13-2 | 387 | TAtgtgctatcattcCA | 363_1 | −19.5 | 3944 | |
| 108 | AACCATTATTATGTAC | 4-8-4 | 388 | AACCattattatGTAC | 364_1 | −18.5 | 4022 | 3049 |
| 109 | CCACTTGGACAAAAAC | 4-8-4 | 389 | CCACttggacaaAAAC | 365_1 | −19.2 | 4066 | 3093 |
| 110 | TCTTACACAATCCTAAT | 4-9-4 | 390 | TCTTacacaatccTAAT | 366_1 | −20.7 | 4154 | 3181 |
| 111 | CTCTTACACAATCCTAAT | 3-13-2 | 391 | CTCttacacaatcctaAT | 367_1 | −19.5 | 4154 | 3181 |
| 112 | AAGCTCTTACACAATCC | 3-12-2 | 392 | AAGctcttacacaatCC | 368_1 | −20 | 4158 | 3185 |
| 113 | ACAAGCTCTTACACAATC | 4-10-4 | 393 | ACAAgctcttacacAATC | 369_1 | −21.3 | 4159 | 3186 |
| 114 | ACAAGCTOTTACACAAT | 2-11-4 | 394 | ACaagctottacaCAAT | 370_1 | −18.3 | 4160 | 3187 |
| 115 | TAGACAAGCTCTTACAC | 3-11-3 | 395 | TAGacaagctcttaCAC | 371_1 | −20.1 | 4163 | 3190 |
| 116 | GGCAACTAATTTATTAC | 4-10-3 | 396 | GGCAactaatttatTAC | 372_1 | −20 | 4247 | 3274 |
| 117 | ACTCTTAGGTCACCAC | 2-11-3 | 397 | ACtottaggtcacCAC | 373_1 | −20.6 | 4359 | |
| 118 | GCCCCAAGAACATCAT | 2-12-2 | 398 | GCcccaagaacatcAT | 374_1 | −20.8 | 4468 | 3495 |
| 119 | CGCAAAACCTTTTCTC | 4-10-2 | 399 | CGCAaaaccttttcTC | 375_1 | −20.8 | 4637 | |
| 120 | CTTAAATACTCTCCAA | 4-8-4 | 400 | CTTAaatactctCCAA | 376_1 | −20.3 | 4740 | 3765 |
| 121 | TGCTTAAATACTCTCCA | 2-11-4 | 401 | TGcttaaatactcTCCA | 377_1 | −22 | 4741 | 3766 |
| 122 | TTGCTTAAATACTCTCC | 2-13-2 | 402 | TTgcttaaatactctCC | 378_1 | −18.1 | 4742 | 3767 |
| 123 | CACAAACAAACAAACTAAACC | 4-15-2 | 403 | CACAaacaaacaaactaaaCC | 379_1 | −19.8 | 4771 | 3796 |
| 124 | GCACAAACAAACAAACTAAA | 4-12-4 | 404 | GCACaaacaaacaaacTAAA | 380_1 | −19.7 | 4773 | 3798 |
| 125 | CAGAAGTATCCACCAAT | 3-12-2 | 405 | CAGaagtatccaccaAT | 381_1 | −19.9 | 4933 | 3958 |
| 126 | GGCTAAACTCACCTCC | 2-12-2 | 406 | GGctaaactcacctCC | 382_1 | −22.2 | 4996 | 4021 |
| 127 | AGGCTAAACTCACCTC | 2-11-3 | 407 | AGgctaaactcacCTC | 383_1 | −20.9 | 4997 | 4022 |
| 128 | AATCCATCCCAAATCCC | 2-13-2 | 408 | AAtccatcccaaatcCC | 384_1 | −21.9 | 5034 | 4059 |
| 129 | ACTAAGCCCTCAATCC | 2-12-2 | 409 | ACtaagccctcaatCC | 385_1 | −21.1 | 5046 | 4071 |
| 130 | AAAGCCTAATCAAACTT | 4-9-4 | 410 | AAAGcctaatcaaACTT | 386_1 | −18.2 | 5072 | 4097 |
| 131 | ATGGACCTTATCTTCC | 2-12-2 | 411 | ATggaccttatcttCC | 387_1 | −20.3 | 5147 | 4174 |
| 132 | ATTGTATCCTTATAACT | 4-9-4 | 412 | ATTGtatccttatAACT | 388_1 | −19.4 | 5196 | 4223 |
| 133 | ACATTGTATCCTTATAA | 3-10-4 | 413 | ACAttgtatocttATAA | 389_1 | −18.3 | 5198 | 4225 |
| 134 | AACATTGTATCCTTAT | 4-8-4 | 414 | AACAttgtatccTTAT | 390_1 | −18.8 | 5200 | 4227 |
| 135 | CACCATGAACCAAAATAAAC | 4-14-2 | 415 | CACCatgaaccaaaataaAC | 391_1 | −20.2 | 5213 | |
| 136 | AACTTTGCTCTACCATC | 2-11-4 | 416 | AActttgctctacCATC | 392_1 | −20.9 | 5296 | 4338 |
| 137 | TCTTAATCATCTCCAAAA | 4-11-3 | 417 | TCTTaatcatctccaAAA | 393_1 | −18.5 | 5478 | 4520 |
| 138 | TCTTAATCATCTCCAAA | 4-9-4 | 418 | TCTTaatcatctcCAAA | 394_1 | −20.1 | 5479 | 4521 |
| 139 | TAAACCAACTTTACCTC | 4-9-4 | 419 | TAAAccaactttaCCTC | 395_1 | −21.7 | 5519 | 4561 |
| 140 | AATAAACCAACTTTACC | 3-10-4 | 420 | AATaaaccaacttTACC | 396_1 | −18.6 | 5521 | 4563 |
| 141 | CAATAAACCAACTTTAC | 4-9-4 | 421 | CAATaaaccaactTTAC | 397_1 | −17.5 | 5522 | 4564 |
| 142 | TTTTCCAATAAACCAACTT | 3-12-4 | 422 | TTTtccaataaaccaACTT | 398_1 | −19.9 | 5525 | 4567 |
| 143 | TTTTCCAATAAACCAAC | 4-9-4 | 423 | TTTTccaataaacCAAC | 399_1 | −17.8 | 5527 | 4569 |
| 144 | CCCTCTTTTCCAATAAACCAA | 2-17-2 | 424 | CCctcttttccaataaaccAA | 400_1 | −24.5 | 5528 | 4570 |
| 145 | CCCTCTTTTCCAATAAAC | 3-13-2 | 425 | CCCtcttttccaataaAC | 401_1 | −23 | 5531 | 4573 |
| 146 | TCCCTCTTTTCCAATAAA | 4-12-2 | 426 | TCCCtcttttccaataAA | 402_1 | −24 | 5532 | 4574 |
| 147 | ATTACCCACAATGCTAT | 2-12-3 | 427 | ATtacccacaatgcTAT | 403_1 | −20 | 5671 | 4713 |
| 148 | CCATGAAGCAATTACC | 3-11-2 | 428 | CCAtgaagcaattaCC | 404_1 | −20.4 | 5682 | |
| 149 | CAGACTAGCCTACCATC | 2-13-2 | 429 | CAgactagcctaccaTC | 405_1 | −21.1 | 5716 | 4758 |
| 150 | TTCCTTACCTCATAAC | 4-10-2 | 430 | TTCCttacctcataAC | 406_1 | −20.1 | 5749 | |
| 151 | TGAACACATCTCCACTACA | 2-15-2 | 431 | TGaacacatctccactaCA | 407_1 | −21.6 | 5834 | 4874 |
| 152 | AACACATCTCCACTACA | 3-12-2 | 432 | AACacatctccactaCA | 408_1 | −19.3 | 5834 | 4874 |
| 153 | AATCTGGTATTCACACC | 3-12-2 | 433 | AATctggtattcacaCC | 409_1 | −19.8 | 5913 | 4953 |
| 154 | CACATCAAAATCTTCTCTCT | 2-16-2 | 434 | CAcatcaaaatcttctctCT | 410_1 | −20.8 | 5967 | 5007 |
| 155 | CATCAAAATCTTCTCTCT | 2-14-2 | 435 | CAtcaaaatcttctctCT | 411_1 | −18 | 5967 | 5007 |
| 156 | TCCACATCAAAATCTTCT | 2-12-4 | 436 | TCcacatcaaaatcTTCT | 412_1 | −20.5 | 5971 | 5011 |
| 157 | GCTCCACATCAAAATCTT | 2-14-2 | 437 | GCtccacatcaaaatcTT | 413_1 | −20.4 | 5973 | 5013 |
| 158 | GCTCCACATCAAAATC | 4-8-4 | 438 | GCTCcacatcaaAATC | 414_1 | −22.1 | 5975 | 5015 |
| 159 | AACGCACAGTTAAACT | 4-8-4 | 439 | AACGcacagttaAACT | 415_1 | −18.3 | 6020 | |
| 160 | AGCTCATTATCTACAAC | 3-10-4 | 440 | AGCtcattatctaCAAC | 416_1 | −21.4 | 6033 | 5073 |
| 161 | GCTCATTATCTACAAC | 2-10-4 | 441 | GCtcattatctaCAAC | 417_1 | −18.8 | 6033 | 5073 |
| 162 | ACCAAGCTCATTATCTA | 2-12-3 | 442 | ACcaagctcattatCTA | 418_1 | −20 | 6037 | 5077 |
| 163 | AACCAAGCTCATTATCT | 2-12-3 | 443 | AAccaagctcattaTCT | 419_1 | −18.5 | 6038 | 5078 |
| 164 | GCCTCAGCAATCTAAA | 2-10-4 | 444 | GCctcagcaatcTAAA | 420_1 | −20.3 | 6070 | |
| 165 | CTTACCTATCATGOTT | 4-10-2 | 445 | CTTAcctatcatgcTT | 421_1 | −20.2 | 6462 | |
| 166 | TGCTGAAATACAAAAATA | 4-10-4 | 446 | TGCTgaaatacaaaAATA | 422_1 | −18.3 | 6512 | |
| 167 | GATCACTGTAATTACA | 4-8-4 | 447 | GATCactgtaatTACA | 423_1 | −19.8 | 6633 | |
| 168 | CAGGGAACCCATTACC | 2-12-2 | 448 | CAgggaacccattaCC | 424_1 | −22.1 | 7010 | |
| 169 | CGAAGCTTCCAACCC | 2-11-2 | 449 | CGaagcttccaacCC | 425_1 | −20.7 | 7099 | 6059 |
| 170 | TACTCACGATCTCCAT | 2-11-3 | 450 | TActcacgatctcCAT | 426_1 | −20.1 | 7119 | 6079 |
| 171 | CTACATGTCCAAATAAT | 4-9-4 | 451 | CTACatgtccaaaTAAT | 427_1 | −19.8 | 7168 | 6128 |
| 172 | GTCTAACATTCCAACTT | 3-12-2 | 452 | GTCtaacattccaacTT | 428_1 | −19 | 7292 | 6252 |
| 173 | TGTCTAACATTCCAACTT | 4-12-2 | 453 | TGTCtaacattccaacTT | 429_1 | −21.5 | 7292 | 6252 |
| 174 | CTAATGTCTAACATTCC | 2-13-2 | 454 | CTaatgtctaacattCC | 430_1 | −17.9 | 7297 | 6257 |
| 175 | TAATGTCTAACATTCC | 4-8-4 | 455 | TAATgtctaacaTTCC | 431_1 | −19.8 | 7297 | 6257 |
| 176 | CCACAAACGTTCCAAA | 4-9-3 | 456 | CCACaaacgttccAAA | 432_1 | −19.8 | 7334 | 6294 |
| 177 | CCCACAAACGTTCCAA | 3-11-2 | 457 | CCCacaaacgttccAA | 433_1 | −21.6 | 7335 | 6295 |
| 178 | CTAGCACACTATCCCT | 2-12-2 | 458 | CTagcacactatccCT | 434_1 | −21.6 | 7354 | 6314 |
| 179 | GCTATAAATACAAACTCA | 4-11-3 | 459 | GCTAtaaatacaaacTCA | 435_1 | −20.2 | 7381 | 6341 |
| 180 | TGCTATAAATACAAACTC | 4-12-2 | 460 | TGCTataaatacaaacTC | 436_1 | −18.2 | 7382 | 6342 |
| 181 | TTGCTATAAATACAAACT | 4-10-4 | 461 | TTGCtataaatacaAACT | 437_1 | −19 | 7383 | 6343 |
| 182 | GAGTTACAAACATACT | 4-8-4 | 462 | GAGTtacaaacaTACT | 438_1 | −19.9 | 7418 | 6378 |
| 183 | CATCACTCCAAGACAT | 4-10-2 | 463 | CATCactccaagacAT | 439_1 | −19.6 | 7436 | 6396 |
| 184 | GATATCTCACTATACCT | 3-12-2 | 464 | GATatctcactatacCT | 440_1 | −20 | 7515 | |
| 185 | AGTGTACCAACCCACA | 2-12-2 | 465 | AGtgtaccaacccaCA | 441_1 | −21.4 | 7592 | 6552 |
| 186 | AGACATTCTCACATTTT | 2-11-4 | 466 | AGacattctcacaTTTT | 442_1 | −18 | 7630 | 6590 |
| 187 | TCAGACATTCTCACATTT | 2-14-2 | 467 | TCagacattctcacatTT | 443_1 | −17.8 | 7631 | 6591 |
| 188 | TCAGACATTCTCACATT | 3-10-4 | 468 | TCAgacattctcaCATT | 444_1 | −21.8 | 7632 | 6592 |
| 189 | CCCAAGCTAGTCTATC | 2-12-2 | 469 | CCcaagctagtctaTC | 445_1 | −20.5 | 7711 | |
| 190 | ATTTTGCATCATTOCCA | 2-13-2 | 470 | ATtttgcatcattccCA | 446_1 | −20.6 | 7819 | 6749 |
| 191 | TGAGATTTTACTAAATA | 4-9-4 | 471 | TGAGattttactaAATA | 447_1 | −17.3 | 7853 | 7183 |
| 192 | TCTTCACCACATCTTTAAACA | 2-17-2 | 472 | TCttcaccacatctttaaaCA | 448_1 | −22.7 | 7950 | 7280 |
| 193 | TCTTCACCACATCTTTAAAC | 2-16-2 | 473 | TCttcaccacatctttaaAC | 449_1 | −20.3 | 7951 | 7281 |
| 194 | AGGTTATCTTCACCAC | 3-10-3 | 474 | AGGttatcttcacCAC | 450_1 | −22 | 7961 | 7291 |
| 195 | CAAATCCGTCCACACA | 4-10-2 | 475 | CAAAtccgtccacaCA | 451_1 | −20.8 | 7976 | 7306 |
| 196 | TTTACCTCCACAACTTCAAAT | 2-16-3 | 476 | TTtacctccacaacttcaAAT | 452_1 | −22 | 7987 | 7317 |
| 197 | ACCTCCACAACTTCAAA | 3-12-2 | 477 | ACCtccacaacttcaAA | 453_1 | −20.2 | 7988 | 7318 |
| 198 | GGTACTTTACCTCCAC | 2-11-3 | 478 | GGtactttacctcCAC | 454_1 | −22 | 7997 | 7327 |
| 199 | TGGTACTTTACCTCCA | 2-12-2 | 479 | TGgtactttacctcCA | 455_1 | −21 | 7998 | 7328 |
| 200 | CCTCTTGTGCTACAAT | 2-11-3 | 480 | CCtcttgtgctacAAT | 456_1 | −20 | 8049 | |
| 201 | TAACCCAATGTACCCA | 2-12-2 | 481 | TAacccaatgtaccCA | 457_1 | −20 | 8238 | 7569 |
| 202 | CCTTTTCAAAAGATACT | 3-10-4 | 482 | CCTtttcaaaagaTACT | 458_1 | −20.5 | 8273 | 7604 |
| 203 | CAGAAAACCAAATCCAATA | 3-12-4 | 483 | CAGaaaaccaaatccAATA | 459_1 | −19.7 | 8327 | 7658 |
| 204 | ATACAGAAAACCAAATCC | 4-10-4 | 484 | ATACagaaaaccaaATCC | 460_1 | −21.1 | 8331 | 7662 |
| 205 | TATCAACATTAATTTAATAA | 4-12-4 | 485 | TATCaacattaatttaATAA | 461_1 | −17.1 | 8351 | 7682 |
| 206 | ATCAACATTAATTTAATAA | 4-11-4 | 486 | ATCAacattaatttaATAA | 462_1 | −16.4 | 8351 | 7682 |
| 207 | ACAAATATCAACATTAATTTA | 4-13-4 | 487 | ACAAatatcaacattaaTTTA | 463_1 | −18.1 | 8355 | 7686 |
| 208 | CAAATATCAACATTAATTTA | 4-12-4 | 488 | CAAAtatcaacattaaTTTA | 464_1 | −16.6 | 8355 | 7686 |
| 209 | CCTACGTTGACATTT | 4-9-2 | 489 | CCTAcgttgacatTT | 465_1 | −19.7 | 8455 | 7786 |
| 210 | ATTATTCCATCCACCTT | 2-13-2 | 490 | ATtattccatccaccTT | 466_1 | −20 | 8505 | 7836 |
| 211 | TGATTATTCCATCCACCT | 2-14-2 | 491 | TGattattccatccacCT | 467_1 | −22.5 | 8506 | 7837 |
| 212 | TTGATTATTCCATCCAC | 3-12-2 | 492 | TTGattattccatccAC | 468_1 | −18.6 | 8508 | 7839 |
| 213 | GACAGACTCCTTCAAAAA | 4-12-2 | 493 | GACAgactccttcaaaAA | 469_1 | −19.8 | 8581 | |
| 214 | ATTGCCCGTTTCTTTA | 3-9-4 | 494 | ATTgcccgtttcTTTA | 470_1 | −22.9 | 8657 | |
| 215 | TTGATAACAGATCCCA | 4-10-2 | 495 | TTGAtaacagatccCA | 471_1 | −19.8 | 8672 | |
| 216 | CTCTAACACAATTCTCTA | 3-13-2 | 496 | CTCtaacacaattctcTA | 472_1 | −19.4 | 8800 | 8309 |
| 217 | CTTCTCTAACACAATTCTCTA | 2-17-2 | 497 | CTtctctaacacaattctcTA | 473_1 | −21.8 | 8800 | 8309 |
| 218 | TCTCTAACACAATTCTC | 4-10-3 | 498 | TCTCtaacacaattCTC | 474_1 | −20.6 | 8802 | 8311 |
| 219 | AGCACCTTCTCTAACACAA | 2-15-2 | 499 | AGcaccttctctaacacAA | 475_1 | −21 | 8807 | 8316 |
| 220 | GCACCTTCTCTAACACA | 2-13-2 | 500 | GCaccttctctaacaCA | 476_1 | −22 | 8808 | 8317 |
| 221 | CAGCACCTTCTCTAACAC | 2-14-2 | 501 | CAgcaccttctctaacAC | 477_1 | −21.4 | 8809 | 8318 |
| 222 | CTTGATGAATCTCTCAA | 3-10-4 | 502 | CTTgatgaatctcTCAA | 478_1 | −19.7 | 8841 | |
| 223 | ACACCCATAATCACCC | 2-12-2 | 503 | ACacccataatcacCC | 479_1 | −21.2 | 8858 | 8367 |
| 224 | AGCCACACCCATAATCAC | 2-14-2 | 504 | AGccacacccataatcAC | 480_1 | −22.6 | 8860 | 8369 |
| 225 | CATAGCCACACCCATAA | 2-13-2 | 505 | CAtagccacacccatAA | 481_1 | −20.2 | 8864 | 8373 |
| 226 | AATAGACAGTCACTCCC | 2-13-2 | 506 | AAtagacagtcactcCC | 482_1 | −19.6 | 8922 | 8431 |
| 227 | TGGAATTCCACAATAC | 2-10-4 | 507 | TGgaattccacaATAC | 483_1 | −18.1 | 8962 | 8471 |
| 228 | TTTACCATTCGCAAT | 4-7-4 | 508 | TTTAccattcgCAAT | 484_1 | −19.7 | 8984 | 8493 |
| 229 | CTTTACCATTCGCAA | 3-9-3 | 509 | CTTtaccattcgCAA | 485_1 | −18.6 | 8985 | 8494 |
| 230 | CTCTTCAACTTTACCATTC | 3-14-2 | 510 | CTCttcaactttaccatTC | 486_1 | −22 | 8989 | 8498 |
| 231 | GCTCTTCAACTTTACCATT | 2-15-2 | 511 | GCtottcaactttaccaTT | 487_1 | −22.6 | 8990 | 8499 |
| 232 | CCAAACACACTATTCTCT | 2-14-2 | 512 | CCaaacacactattctCT | 488_1 | −20.4 | 9010 | 8519 |
| 233 | TACCAAACACACTATTCTCT | 3-15-2 | 513 | TACcaaacacactattctCT | 489_1 | −22.5 | 9010 | 8519 |
| 234 | GTACCAAACACACTATTCTC | 2-16-2 | 514 | GTaccaaacacactattcTC | 490_1 | −21.5 | 9011 | 8520 |
| 235 | ACAGTACCAAACACACTA | 2-13-3 | 515 | ACagtaccaaacacaCTA | 491_1 | −19.9 | 9016 | 8525 |
| 236 | ACAGTACCAAACACACT | 3-10-4 | 516 | ACAgtaccaaacaCACT | 492_1 | −22.3 | 9017 | 8526 |
| 237 | TAATATGGCTCTTCAC | 4-9-3 | 517 | TAATatggctcttCAC | 493_1 | −19.6 | 9048 | 8557 |
| 238 | AAGAACCTACCACCTTCTT | 2-15-2 | 518 | AAgaacctaccaccttcTT | 494_1 | −21.9 | 9078 | 8587 |
| 239 | GAACCTACCACCTTCT | 2-12-2 | 519 | GAacctaccaccttCT | 495_1 | −21.3 | 9079 | 8588 |
| 240 | AAGAACCTACCACCTTCT | 2-14-2 | 520 | AAgaacctaccaccttCT | 496_1 | −21.7 | 9079 | 8588 |
| 241 | AGTAACCACCTCCAAATC | 2-14-2 | 521 | AGtaaccacctccaaaTC | 497_1 | −20.9 | 9130 | 8639 |
| 242 | CAGTAACCACCTCCAAA | 2-11-4 | 522 | CAgtaaccacctcCAAA | 498_1 | −22.1 | 9132 | 8641 |
| 243 | CAGTAACCACCTCCAA | 3-11-2 | 523 | CAGtaaccacctccAA | 499_1 | −20.8 | 9133 | 8642 |
| 244 | ATGACAATATCTTCTCT | 3-10-4 | 524 | ATGacaatatcttCTCT | 500_1 | −20.5 | 9173 | 8682 |
| 245 | CATCCCACAAGACAACT | 4-11-2 | 525 | CATCccacaagacaCT | 501_1 | −22.6 | 9214 | |
| 246 | ATCCTGAGTACAAACC | 3-10-3 | 526 | ATCctgagtacaaACC | 502_1 | −20 | 9232 | |
| 247 | CTATTAAGGAACTCCT | 3-10-3 | 527 | CTAttaaggaactCCT | 503_1 | −20.2 | 9294 | 8803 |
| 248 | ATAACTACATGAAATCA | 4-9-4 | 528 | ATAActacatgaaATCA | 504_1 | −17 | 9313 | 8822 |
| 249 | ATTACAAACCTCCACCAC | 2-13-3 | 529 | ATtacaaacctccacCAC | 505_1 | −22 | 9380 | 8889 |
| 250 | GATTACAAACCTCCACC | 3-12-2 | 530 | GATtacaaacctccaCC | 506_1 | −22.3 | 9382 | 8891 |
| 251 | AGGATTACAAACCTCC | 2-12-2 | 531 | AGgattacaaacctCC | 507_1 | −19.1 | 9385 | 8894 |
| 252 | AACAATTCCTACCCTATCTTT | 2-17-2 | 532 | AAcaattcctaccctatctTT | 508_1 | −22.5 | 9409 | 8918 |
| 253 | AACAATTCCTACCCTATCTT | 2-16-2 | 533 | AAcaattcctaccctatcTT | 509_1 | −21.7 | 9410 | 8919 |
| 254 | TTCAACAATTCCTACCC | 4-11-2 | 534 | TTCAacaattcctacCC | 510_1 | −22.6 | 9416 | 8925 |
| 255 | CCTTCAACAATTCCTACC | 2-14-2 | 535 | CCttcaacaattcctaCC | 511_1 | −23.6 | 9417 | 8926 |
| 256 | GCTCACCTTCAACAATTC | 2-14-2 | 536 | GCtcaccttcaacaatTC | 512_1 | −21.5 | 9422 | 8931 |
| 257 | GCTCACCTTCAACAATT | 2-13-2 | 537 | GCtcaccttcaacaaTT | 513_1 | −20 | 9423 | 8932 |
| 258 | GCTCACCTTCAACAAT | 2-12-2 | 538 | GCtcaccttcaacaAT | 514_1 | −19.3 | 9424 | 8933 |
| 259 | TCCATCTCAAAAAGACT | 4-11-2 | 539 | TCCAtctcaaaaagaCT | 515_1 | −19.9 | 9496 | 9005 |
| 260 | AAGGCCGCCTTAAAC | 3-9-3 | 540 | AAGgccgccttaAAC | 516_1 | −19.6 | 9521 | |
| 261 | CTATGTAAGCCCAACA | 2-11-3 | 541 | CTatgtaagcccaACA | 517_1 | −19.9 | 9585 | 9094 |
| 262 | TTCCCCCTTTATTCAAA | 3-10-4 | 542 | TTCcccctttattCAAA | 518_1 | −22.9 | 9682 | 9191 |
| 263 | CTTCCCCCTTTATTCAA | 2-13-2 | 543 | CTtccccctttattcAA | 519_1 | −21.3 | 9683 | 9192 |
| 264 | ACATTCCGCACATCTC | 2-12-2 | 544 | ACattocgcacatcTC | 520_1 | −19.4 | 9705 | 9214 |
| 265 | TATCACATTCCGCAC | 3-10-2 | 545 | TATcacattocgcAC | 521_1 | −18 | 9710 | 9219 |
| 266 | GAACATATCACATTCC | 4-8-4 | 546 | GAACatatcacaTTCC | 522_1 | −20.4 | 9714 | 9223 |
| 267 | TCCCCTAGAATAATAC | 4-9-3 | 547 | TCCCctagaataaTAC | 523_1 | −22.1 | 9733 | 9242 |
| 268 | ACTCCCCTAGAATAAT | 2-10-4 | 548 | ACtcccctagaa_TAAT | 524_1 | −19.5 | 9735 | 9244 |
| 269 | ATCGATACTCCCCTA | 3-10-2 | 549 | ATCgatactccccTA | 525_1 | −20.8 | 9742 | 9251 |
| 270 | ACATCGATACTCCCC | 2-11-2 | 550 | ACatcgatactccCC | 526_1 | −20.1 | 9744 | 9253 |
| 271 | TTTACCCATCTCCCATTT | 2-14-2 | 551 | TTtacccatctcccatTT | 527_1 | −22.5 | 9764 | 9273 |
| 272 | ATTTACCCATCTCCCAT | 2-13-2 | 552 | ATttacccatctcccAT | 528_1 | −21.9 | 9766 | 9275 |
| 273 | GGAAGCTCAATACCCA | 2-12-2 | 553 | GGaagctcaataccCA | 529_1 | −20.2 | 9790 | 9299 |
| 274 | GTTTCTACCCACACCAC | 2-13-2 | 554 | GTttctacccacaccAC | 530_1 | −22.2 | 9832 | 9341 |
| 275 | TACAGTTTCTACCCACA | 3-12-2 | 555 | TACagtttctacccaCA | 531_1 | −22 | 9836 | 9345 |
| 276 | CTACAGTTTCTACCCAC | 2-13-2 | 556 | CTacagtttctacccAC | 532_1 | −20.4 | 9837 | 9346 |
| 277 | GTAACAGCTAATTTCAT | 3-10-4 | 557 | GTAacagctaattTCAT | 533_1 | −19.9 | 9880 | 9389 |
| 278 | AGTTCCTATCACTTCAC | 3-11-3 | 558 | AGTtcctatcacttCAC | 534_1 | −22.6 | 9940 | 9449 |
| 279 | ATCCTTTCTCAGAATCCA | 3-13-2 | 559 | ATCctttctcagaatcCA | 535_1 | −22.8 | 10116 | |
| 280 | ATTGGTCTCACAACTCA | 2-13-2 | 560 | ATtggtctcacaactCA | 536_1 | −18.9 | 10136 | |
| 281 | ACCCAACTAGATCCAAT | 2-11-4 | 561 | ACccaactagatcCAAT | 537_1 | −21.2 | 10279 | |
| 282 | ATAATTCATGOTTAAC | 4-8-4 | 562 | ATAAttcatgctTAAC | 538_1 | −16.2 | 10310 | |
| 283 | ATGAATGACTAAATCTA | 4-9-4 | 563 | ATGAatgactaaaTCTA | 539_1 | −18.5 | 10377 | |
| 284 | CACATCTGACTTTTCCTC | 2-13-3 | 564 | CAcatctgacttttcCTC | 540_1 | −22.8 | 10466 | |
| 285 | TAGTCAACTACCTCCA | 2-12-2 | 565 | TAgtcaactacctcCA | 541_1 | −19.8 | 10482 | 9989 |
| 286 | TTAGTCAACTACCTCC | 4-10-2 | 566 | TTAGtcaactacctCC | 542_1 | −22.1 | 10483 | 9990 |
| 287 | TCAGCATGTCTTAATC | 4-9-3 | 567 | TCAGcatgtcttaATC | 543_1 | −20.4 | 10503 | |
| 288 | CAAATGTTCTACCCAAT | 3-10-4 | 568 | CAAatgttctaccCAAT | 544_1 | −20 | 10534 | 10041 |
| 289 | TCAAATGTTCTACCCAA | 3-10-4 | 569 | TCAaatgttctacCCAA | 545_1 | −22.2 | 10535 | 10042 |
| 290 | GGAAAATTTTCAATCTTT | 4-10-4 | 570 | GGAAaattttcaatCTTT | 546_1 | −19.1 | 10681 | 10185 |
| 291 | CCAGTACTCATTAATAA | 3-10-4 | 571 | CCAgtactcattaATAA | 547_1 | −20.2 | 10740 | 10244 |
| 292 | ACCCAGTACTCATTAAT | 3-10-4 | 572 | ACCcagtactcatTAAT | 548_1 | −22.4 | 10742 | 10246 |
| 293 | CACCCAGTACTCATTA | 2-12-2 | 573 | CAcccagtactcatTA | 549_1 | −19.4 | 10744 | 10248 |
| 294 | GGTCCCGACATACAT | 2-11-2 | 574 | GGtcccgacatacAT | 550_1 | −19.5 | 10802 | |
| 295 | ATAACAAAGACTTTCTTT | 4-10-4 | 575 | ATAAcaaagactttCTTT | 551_1 | −18.2 | 11071 | |
| 296 | CCATACTCCCACATCT | 2-12-2 | 576 | CCatactoccacatCT | 552_1 | −22.7 | 11507 | 11011 |
| 297 | TTCAGCATTAACCATA | 4-8-4 | 577 | TTCAgcattaacCATA | 553_1 | −21.7 | 11518 | 11022 |
| 298 | AGACTCTTTGACAATC | 4-8-4 | 578 | AGACtctttgacAATC | 554_1 | −19.6 | 11537 | |
| 299 | CTCAGTGATCAACCCT | 3-11-2 | 579 | CTCagtgatcaaccCT | 555_1 | −21.7 | 11563 | |
| 300 | AGTAACTGAATAACCA | 4-9-3 | 580 | AGTAactgaataaCCA | 556_1 | −19.9 | 11585 | 11089 |
| 301 | TTGCTGTAAATTATTCA | 4-10-3 | 581 | TTGCtgtaaattatTCA | 557_1 | −19.9 | 11694 | |
| 302 | TAGTCATTTCTAACTTCT | 3-13-2 | 582 | TAGtcatttctaacttCT | 558_1 | −19.8 | 11886 | |
| 303 | ATTGAAGCAACTCACA | 3-9-4 | 583 | ATTgaagcaactCACA | 559_1 | −19.5 | 11918 | 11423 |
| 304 | TACAAGAAAATTAATTTCT | 4-11-4 | 584 | TACAagaaaattaatTTCT | 560_1 | −17.2 | 11943 | |
| 305 | ACTAAGTCATTACACT | 4-8-4 | 585 | ACTAagtcattaCACT | 561_1 | −20.5 | 11981 | |
| 306 | AATGTTCAATTTCTATTT | 4-10-4 | 586 | AATGttcaatttctATTT | 562_1 | −17.9 | 11998 | |

[0283] In the table, capital letters are beta-D-oxy LNA nucleosides, lowercase letters are DNA nucleosides, all LNA C are 5-methyl cytosine, and all internucleoside linkages are phosphorothioate internucleoside linkages.

The application's sequence listing, which the Patent Office published only in electronic form, follows.

SEQUENCE LISTING (586 sequences)

SEQ ID NO: 1 - DNA, 12015 bp, Mus musculus
  source 1..12015: mol_type = other DNA
aaaggccactccctctggagctgcaggggcttaactgcatgaccagaggcaggagaggaggctggcccacttgttcccatcagctcctgaaggtaacaactttaagagcaagccttaaagagagaagctttgatgaaggaagagggaaagacaaggaaccatgtacagtaaggtttggagcaaagatggagggttggaaggagctcagcgagaggtcagaatacagacacgggttctcacatgtaggacccagccccaccccacaacagcctcatcctttcacacagcagtgtttcaggggtcagaggcaatttgtgaaagacttttctgggaactatgggaagataccttgctctttaagcaaaggacaaaacaaaccaactcgagaaaagtaagggaaagcatatctgaatgtcctgacttttctcagctttcccttttccagcactctgcatcctatcaccacacggccggccatactttctttctgattagcgtctcccaaggtcccttcctgtccctactgaaggaaacactttcctccttcagtggccattgggccaccagcagaagcaacacctgtaatagcttgtcaaagggggcaggcttgaatgggagaggatctgtctggaagctccagcctgtttggaaatgcagagaccgatgcaaggggccaggagtgggtggaggaggacacaaaagacagggagaaactcctcactcaattgtaggaatattggaagatgtttggggacagggttaattgagggctggtctgggaagttagtctaaatctcactggggagggtgtcatggtatcatgtgatgaccattcctgacaggtacctatttctatggtattctttcaaaggtgacactgagccctgggtggtccctcactaccaaagcaagcacctgtatttgtcagataaagacagccaggactgctgactgccctttacctccaaaatcagagagccagagagccagagagccagagagccatgggcaaatcgccagggatgtggtaagtgatcaggtatctacagaaatgactccatctctaccttttttctctctttcacagttttgggacagtgtgtcactatgcagcccaagctggcgtaacatcacccttcctctgtccccagagtgctggacttagacacaggcctgttgtatgtgatttcccatttctctagaaagagctcagatatgaaccttgacttttaattatttatttatttattctgtatatatttgtttattccatgacatgttggctgcctaacggtcagagttctgcatgaagccatcggttcccggcttcccacctctgtgtgacttttttttcctcttccaggtgtttggtcctgttttctcttttggcatcattttctgctgagcccaccatgcatggggagatcctgtcccctaattatccccaggcgtaccccaatgacgtcgtgaaatcttgggacattgaagtcccagaggggtttgggattcacctttactttacccatgtggacatagagccgtcagagagctgtgcatacgactcagtgcaggtatattacagcacaggagggagagggatgggaggagcgggggggggatggaggaatgagaggatttagggggctgtgtgttgtcaagccgtcctatggggtaggggcatggctcaatggcagggtacttgccatgcaaggacatgtccctgagtttggtccccagcactgggggaacatgaggtgggggtgggggagacagaccggacagacagacggagctggagatcgggagtaaaggttctgctctctttgcccattctcagttttacatttccttcttctcttagataatctcaggagacatcgaggaagggagactctgtggccagaggaccagcaagagccccaactcccccattatagaagagtttcagttcccatacaataaacttcaggtggtctttacctcagacttctccaacgaagaacggtttacgggctttgcagcatactacactgccataggtaaggcatccgtctgtacgtgacatctggatcaaactaaaagatgggaggcaggtaaaggaccacgcagtgcatgaaatgaggattctgttttctctctttgagtcatagtctggctatgcagccatgggtggacactccaagactccagctttgtgccactgcccccgggctgcttacatctttaatgaatgttgacttgccctgggtctgcttaggaattgccttgcctttgtgtgactttatcgcatgttagtggtggtaaagcagataatgagactgagaaccactgagaaatggttctctatcaggaggcttgcttacatgaatgcaaccttcacctcaattctgcagtgtggtcggcatggtcttcctataaagatacggatctggtctcagtggtgcaggactgtaatcccatacactctgaaggctgaagcagaagaactgtcaactctaggtcaacaggggcaacttagtaagaacctgtcttcctatcagaagtaaagagaacgctgttgagacagttcagtcagtgaaatggttgctatacaaccacccattagagttcaggttccatgagaaggtagaaggaataacgaacgctatacgcttgtcctttgaccttcatatgtctgccctggcatgcctctgtcatgcacataaacgggcatggatagtaataagaaatgctaatttaatcccatcactcaggaagcagaggcaggcatatctctgtgaatttgaggctagcctggtctctagagtgagttctggtacagccaggggtatataaatagagatcctgtttcaaagaaaaaaaaattaaaaggagggctgggaattctgtcatggtgcacacacctgtaattccagtcctaagcagaggcaggagaatcaggaattcaagggcagcctgggttacagaagactctgtattaaaagataatcactccagcttagtgaatgaatgcttcctttgtgtctgaaaggatctcagaaacctcaagactagggaaaaactgaaaactgagaacattaatactttgccaaggaatgtataagcaggactatgtggtactaggtccttctacatccatctccaggttaaaatgaagttaggcctgctcgtaagtccaaatgtcatcagttttacagaaagaccaacatcctataaagtaggtcctaacctttctccccaggtgacgtcaccaccgtctttcctttcagcggtgtctctggcacagattcttttcttttccagacagagtgtctctatgtagcccaggctggccttgaactcctgattctcttgcttcagtcttctgaatgctggagttacagcatgtaccaattgggcagggtgttgtatagtttgtacgcaagaaaagtcatagggttttcatggtggagctccttacagcgccgtggcaaaacacagctctgagtcagacttcagaaaagtagtttagattgtattcgtagattttaaaatatggggctggaaagagatgacccagcagttcagggaacttgctgtgttcatagaggaccagagttcagttcccagcatccacatggcagctcacaactgttggtaactccaaaacaagagcatcttatactcttttctgatctcaaagtgcaccagacctgcatgtagtataaaatatcaatacaataaatacatccataaatattgaaaaactaaagtgtgttaagatttattttattattttaaatcttttatttatctcatgtgtgtaggtgttttgcttgctagcaagtatgtgcatcacatacatagggtatctgaggagtccaccagaaggcattgggtccctggaactgcactggaattatagcgttgtgagctgccttgtgggtgctgggaattgaacctctggaatgatagcacatactcttaaccagtgagccatatctctacccctccaaacttcttttattaaaatgtcttacctgtacataataatggtttcattatgacatgttcatactcatctatgtttttgtccaagtggccctcagtacattgtctcctcctaatcccccctctcttctgtgttttgcttttcagtcctttttattttttcattaggattgtgtaagagcttgtctaggggttacttataggtacatcggcaccttaccagtggctgcatgctaaagatgtctctcttcctgcagtaataaattagttgcctatagcgcctcggggtggggtggagtcctcctgagtccttccccatgccatgacaggatatcgccaggcacagtcttgttcagataataacagccgtggtgacctaagagtgtcgtggcctatcacgcctggaagacagcatcccgcaaaacttccgtctgttcctctggctcctacattcttttgtgcatgtccccctctttcatgatgttcttggggccttagagtcttccttccttcctcctttgctgtctcctactcttcctctctcccttcctccttcacttcttccttccttccagctgtccctctgtctcttactctctgtcttgtctgtctctgactctgtctgtctctcttcctttctttcttggagaaaaggttttgcgttgaagcccaggctggctttgaactcatgtctttctgtttcacctacctgaatactgggattactggcatgagccattatacctggcttggagagtatttaagcaacaaaccttttctggtttagtttgtttgtttgtgctttatccttatagatttggcttccatcgttcttccttcttggtctttgttcttcaccttgagttttctctgctttttgcagacataaatgaatgcacagattttacagatgtcccctgtagccacttctgcaataacttcattggtggatacttctgctcctgtcccccagaatacttcctccacgatgacatgaggaattgtggaggtgagtttagcctccagaggtcttcatgttccctgggatttgggatggattgagggcttagtctatcgttccaagtttgattaggctttccctccaaattgcacctgctgttagctgttcacaaactgaataggatcctcaggagggggaagataaggtccatcacctttacattgctgtgaacggtgacttcaacagttataaggatacaatgtttattttggttcatggtgtagagtgggcagatccattgttttggggtcagtgaccaggtggatcatcacgaaagggagtcagatggtagagcaaagttgctcatcacagggcagcagggaggcagagagggagggcagaggtacaaatgtccttttcaggtcatagttccatgaccttacttccagctaacaggctagatgaagattccaccacccacctaacagtgtcacaggccagtgaccaagcccttagcatatgtcacttttggagatgattaagacccaaagcacaacaggaggcttcgaggtaaagttggtttattggaaaagagggatagatgcctgtgaagagactgcccgagtttgttcacaactatggaaagttccacatggaaactttcatatataaccacagcaaacagagagaccatgcaaaggcattggctagcttgcctcatagcattgtgggtaattgcttcatggaggcttcttttgagaacagatggtaggctagtctgaatggagaactctgaggttatgaggtaaggaacagagagggcggggacttcttgtctctgtatctgattggtcctttcccattttctctcctctagtcaactgtagtggagatgtgttcactgccctgattggggagatctcaagtcccaattatcccaatccatacccggagaactcaaggtgtgaataccagattcagctgcaggagggcttccaagtggtggtgacgatgcagagagaagattttgatgtggagcccgctgactcagaggggaactgccctgacagtttaactgtgcgttgtagataatgagcttggttctgacccccaactcatttagattgctgaggcttctctggcagccgcattctctgtggttctgggcaaacactccactgcatagctacagccgttgctcagagactagttttactttttgattctctctgtctctttcctctctttctctggctctctctgtctacatctttatcctggtgtttccttaagccagggctttgctatgtagcccaggctggactcaaaactcaaaatgccctctcttcacagcctcttgagtgctaggattacagatgtcagtttccactcctggtgagagcatcctccttcctcctttaatctccctctcctctctctccctccctccctccctccctccatgcctttatttcttccttcctgcactggggattgaacctttggccccaagcatgataggtaagagctataccactgagctacttttgcagccctttctatttttgtatttcagcacaatgtttccttgaattgcccaagctgactttaatttgtaatcctcctgtctcggtcttccaagtagctgtgattaaaggcctacactaacagacccattgtttgtaattacagtgatctttcctcctccactttctctctctctctctctctctctctctctctctctctctctctctctctctctctctctctctctctctctgtctctctcctcttcctttctcccttcccttcccttcccttcccttcccttcccttcccttcccttcccttcccttcccttcccttcccttcccttcccttcccttcccttccttctctctctctctctctctctctctctctctgttccactaaggacactctcacttcataccacatcgtttaattatttcctatacatttttctctcttgtgttttgtaacattgtttccttccagtttgcttcaaaaaaccaacagtttggtccttactgtggtaatgggttccctggaccgctaactattagaacccagagcaatactctcggcattgtctttcaaactgacctaatggggcaaaagaagggttggaagcttcgttaccatggagatcgtgagtaccctaaaaactcctctttgactggggatacaacattatttggacatgtagactaaaaacacagagactgttcttcagctaatatttttttaactagtctcaaaaatacagacaagggggaggaggggcagccaatgtgtggcatcatatccttttacaagttggaatgttagacattagaactgaggacaatgggaaactttggaacgtttgtgggaacagggatagtgtgctaggcatgaggatctgagtttgtatttatagcaaaaatctagccatagccaagtatgtttgtaactcctatgtcttggagtgatgggcagagaaagggacaccacggggtcttggggtcagctagcctgggcaaacatggcaagctccaggtatagtgagatatcctctctcaagagggtaaggtacagagtgacagagcaggcacccagtgtccttcttcagcctgtgggttggtacactagcccccctgccccatacacagaaaatgtgagaatgtctgaagatgctattacacagatataattccagtcctggagaagtggaggcaggagaattactgcaagatagactagcttgggcaaaccccaatctatcctatggtacacagagagatcctgtctcaaaacgggggtggtggtggtggtggtggtggtggtggtggtggtggtggtgggaatgatgcaaaatagcacacggtttccagctatttagtaaaatctcatttctgttgtctccaagccatctcctgtgccaaaaaaatcactgccaattctacttggcagcccgataaggcaaaatacgtgtttaaagatgtggtgaagataacctgtgtggacggatttgaagttgtggaggtaaagtaccacacaggcatctttttaacctcaggcttggatcagtattgtagcacaagaggttgtcgctgcctgatcaaggtattaacccctcccaaggatgggccgaatcaaggttgtcagtcgttcctgtgaggtctggatctcttggtccagcttgccctctctgccctcagtcttcccgtggacggggagctgaaatgccgggacagagttgtcttctcatcgcagctcctgggtacattgggttactcttctaaagatgttccaagtatcttttgaaaaggacttgtcattgatccaagaccagagattcaatttcattattggatttggttttctgtatgcttattaaattaatgttgatatttgttttcctccagggacatgttagctctacttcatactattccacttgtcaaagcgatggacagtggagcaactccggtctaaaatgtcaacgtaggtgtctcttcaaagcagaattcctctttcccctcccaaggtggatggaataatcaacacatcaaaattcaaatgcatggtttccctccaggctctcaagaaaatgacttgcatttttgaaggagtctgtcatagagaattgtctagccctctcctagtcttaggccaattagactaccatgtttcgtctaaagaaacgggcaatgggatctgttatcaatagctctatgggagtacattccaggcttgcacaggaggctcctaccaaccagagaactatgttcctcctggtctctttcaagagccatctgcattggcagctctcagagggctagagaattgtgttagagaaggtgctgcaagaaggctggctttgagagattcatcaaggggtgattatgggtgtggctatgggaggggtgaagatggaatgggtccctaactctttctgggagggagtgactgtctatttccccaattcttcttgtagctgtgtattgtggaattccagatcccattgcgaatggtaaagttgaagagccagagaatagtgtgtttggtactgttgttcactacacgtgtgaagagccatattactacatggaacatgaagaaggtggtaggttcttctaccagagaagagagagggaaggagtgtgggtgatttggaggtggttactgctttttctctctggttggagagacagagaagatattgtcatccttttggcttagtctaaggacacagttgtcttgtgggatggggtttgtactcaggatcattcaggatgtcatagaagccaccagcttagtgtcagcgtgcaacaggagttccttaatagcactgatttcatgtagttatctgactccatagcagttatttcagataaaatccacaggaggacaggcatggtggtggaggtttgtaatcctagcccttgaaagatagggtaggaattgttgaaggtgagcctgagctatcccccttttcttcttcttcccccatcctctcctcctcatctctctctagtctttttgagatggattcacagggtttaaggcggccttttctatgtagcagaggctggcctggatctttctgcatctacctgctaagtgttgggcttacatagcagtgccatcattcccagctgaaggttcttttctagctcatttgatctgcttacctgttcaatgtccaaaggggctggagctttgaataaagggggaaggaggagagatgtgcggaatgtgatatgttccttgtattattctaggggagtatcgatgtgctgcaaatgggagatgggtaaatgaccagctgggtattgagcttccaagatgtattccaggtaatctgggctgtggtgtgggtagaaactgtagctatacacgcagggagtaagcattgcatgaaattagctgttaccctcccggaaagggcttagccctgtctccgggagctcagcacagtgaagtgataggaactctggactgggaaattccttcaatggcatcaacttaggtcaacttgaagggaaatagaaaagactgccgtcatcaacagttgctgtcacatcagtcactagggaagtgcagatcaaaccatgctaagagagctgggtgtacacttgtaatcctagcactctggattctgagaaaggattgtgagttgtgagaccaatctggactacatagtgagaccccacaaccctgcaccacacacacactagataaggacttcatctgagtagcagttgaaggcagaaagcctgctgctgttacctgtgtccagtgaagagtctctcagcattggatctagttgggtttttggccttagaggttaagcatgaattatgcctcagaagggctgtgggtcaagcagtgaactgtgaaatactagctcatttagatttagtcattcatttaaccctcctgttgagccagtatcctccataaatctgcttggcattggcaaagggggtgttttggtgagaggaggaaaagtcagatgtggaggtagttgactaatattgattaagacatgctgaagaactctgccacccattgggtagaacatttgagaggctgaacttttcagaggtcatcatcatttgatgcatctctctatttggttcttattccttcctagcctgtggagtacccaccgagccctttcaagtgcatcagaggatatttggaggacaacctgcaaagattgaaaattttccctggcaagtcttctttaatcaccccagagctagtggggctcttattaatgagtactgggtgctgacggctgctcacgttttggagaaaatctccgaccctttaatgtatgtcgggaccatgtctgtgaggacaactctcttggaaaatgcccagagactctacagtaaacgtgtctttattcatcccagctggaagaaagaagatgacccaaacacacggacaaattttgacaatgacattgccctggtgcagctgaaagaccctgtgaaaatgggacccaaagtctcccccatctgcctaccaggcacctcctcagagtacaacgtctcaccgggtgacatggggctgatctcagggtggggcagtacagaaaagaaagtctttgttatcaacctcagaggggcaaaggtaccagtaacctctttagaaacctgcaaacaggtgaaagaggagaaccccactgtaaggcctgaggactatgttttcactgacaacatgatctgtgctggcgagaaaggtgttgacagctgtcacggggacagcggcggggcttttgctttccaggtccccaatgtcacggtccccaaattctatgtagctggcttggtgtcttgggggaaaaggtgtgggacttatggggtctacacaaaggtaaagaattacgtggactggatcctgaaaactatgcaggagaatagtgggcccaggaaggactaatccgtagggcgacaactcccctcaagggcatagcaagctcactgttctcagatcctatggtggtccccttatttcacaacgatggagagaagatgtgggagtatggttaatgctgaacttgattgtcaaagagtctgcatggaggcagggttgatcactgagccgtgttggttattcagttactattgctaacaacatggcagaaacccttctatcttgcgctattccacagggatatcttatccgatcttccctcatttaacctgcttgaaattcctgaataatttacagcaaagcatgcttccaacctggttctggctgtatggagagccacgaagggagagagggagatttgggggcatagcatcatggaattcaggcatcaacagcatggaactctgcatctctaacaagatgcagacagggaacacagccttttattctttctagtgagacttaccgaatactcagaagttagaaatgactaccttagtttttctctgtgagttgcttcaatatatttcctagaaattaattttcttgtaatcctcctttgtatcatacagtgtaatgacttagtaaaatagaaattgaacatt

SEQ ID NO: 2 - DNA, 11461 bp, Mus musculus
  source 1..11461: mol_type = other DNA
tgccctttacttccaaaatcagagagccagagagccatgggcaaatcgccagggatgtggtaagtgatcaggtatctacagaaatgaatccatctccaccttccttctctctttcacagttttgacacagggtgtcactatgcagcccaagctggcatgacatcacccttcctctgtccccagagtgctggacttagacacaggcctgttgtatgtgatttcccatttctccagagagagctcagatctgaaccttgacttttaattatttatttatttattctgtatatatttgtttattccatgtcatgttggctgcctaacggtcagagttctgcatgaagccatcggttcccggcttcccacctctgtgtgactttttttcccctcttccaggtatttggtcctgttttctcttttggcatcattttctgctgagcccaccatgcatggggagatcctgtcccctaactatccccaggcgtaccccaatgacgtcgtgaaatcttgggacattgaagtcccagaggggtttgggattcacctttactttacccatgtggacatagagccgtcagagagctgtgcatacgactcagtgcaggtatattacagcacaggagggagagggatgggaggagcggggagggatggaggaatgagaggatttagggggctgtgtgttgtcaagccgtcctatggggtaggggcatggctcaatggcagggtacttgccatgcaaggacatgtccctgagtttggtccctagcactgggggaacatgaggtgggggtgagggagacagaccggacagacagacagagctggaggtcgggagtaaaggttctgctctctttgcccattctcagttttacacttccgtcttctcttagataatctcaggaggcatcgaggaagggagactctgtggtcagaggaccagcaagagccccaactcccccattatagaagagtttcagttcccatacaataaacttcaggtggtctttacctcagacttctccatcgaagaacagtttaccggctttgcagcatactacactgccataggtaaggcatccctctgtatgtgacatctggatccaactaaaagatgggaacaggtaaatgaccactcagtgcatgagatgagaattctgttgtctcgctttgagtcatagtctcgatatgcagccatggctggacactccaagactccagctttgtgccactgcccccgggctgcttacatctttaacgaatgttgacttgccctgggtctgcttaggaattgccttgcctttgtgtgactttatcgcatgttagtggtggtaaagcagataatgagactgagaaccactgagaaatggtcctctatcaggtggcttgcttacatgaatgcaaccttcacctcaattctgcagtgtgggcagcatggtcttcctataaagatacggatctggtctcagtggtgcaggactgtaatcccatacactctgaaggctgaagcagaagaactgtcaactctaggtcaacaggggcaacttagtaagaacctgtcttcctatcagaagtaaagagagggctgttgagacagttcagtcagtgaaatggttgctatacaaccgcccattagagttcagggtccatgagaaggtagaaggaataacgaacactatacgcttgtcctctgaccttcatatgtctgccctggcatgcctccatcatgcacataaacgtgcatggatagtaataagaaatgctaatttaatcccatcactcaggaagcagaggcaggcatatctctgtgaatttgaggctagcctggtctatagagcaagttctacgacatccagggttatatagatagagatctggtctcaaaaaaaaattaaaaggagggctgggaattctggcacagtgcacacacctgtaattccaatcctaagcagaggcaggagaatcaggaattcaagggcagcctgggttacagaagactctatattaaaagataatcactccagcttagtgaatgaatgcttcctttgtgtctgaaaggctctcagaaacctcaagactagggaaaaactgaaaactgagaacattaatactttaccaaggaatgtataagcaggactatgtggtactaggtccttctacatccatctccaggttaaaatgaagataggcctgctcgtaagtccaaatgtcatcagttttacagaaagaccaacatcctataaagtaggtcctaacgtttctccccaggtgacgtcaccaccgtctttcctttcagcggtgtctctggcacagattcttttcttttccagacagagtgtctctatgtagcccaggctggccttgaactcctgattctcttgcttcagtcttctgaatgctggagttacagcatgtaccaattgggcagggtgttgtatagtttgtacgcaagaaaagtcatagggttgtcatggtggagctccttacagcacagtggcaaaaaacagctctgagtcggacttcagaaaagtagtttagattgtattcgtagattttaaaatatggggctggaaagagatgacccagaagttcagggaactagctgtgctcatagaggaccagagttcagttcccagcatccacatggcagctcaaaactgttggtaactccaaaacaagagcatctaatactcttttctgatctcaaagtgcaccagacctacatgtagtataaaatatcagtacaataaatacatccataaatattgaaaaactaaagtgtgttaagatttattttattattttaaatcttttatttatctcatgtgtgtaggtgttttgcttgctagcaagtatgtgcatcacatacatagggtatctgaggagtccaccagaaggcattgggttccctggaactgcactggaattatagcgttgtgagccgccttgtgggtgctgggaattgaacctaggaatgatagcaagtactgttaaccactgagccatatctctacccctccaaacttcttttattaaaatgtcttacctgtacataataatggttccattatgacattttcatactcatccatgtttttgtccaagtggccctcagtacattgtctcctgctaatcccccctctcttctgtgttttgcttttcagtcctttttattttttcattaggattgtgtaagagcttgtctaggggttacttataggtacatcggcaccttaccagtggctgcatgctaaagatgtctctcttcctgcagtaataaattagttgcctatagcgcctcggggtggggtggagtcctcctgagtccttccccacgccatgacaggatatcgccaggcacagtcttgttcagataataacagccgtggtgagcctaagagtgtcgtggcctgtcacgcctggaagacagcatcccgcgatcttccttctgttcctctggctcctacattcttttgtgcatgtccccctctttcatgatgttcttggggccttagagtcttccttccttcctcctttgctgtctcctactcttcctctctcccttcctccttcacttcttccttccttccagctgtccttctgtctctgtctctctgtcttgtctgtctgtgactctgtctgtctctcttcctttctttcttggagaaaagcttgtgttgaagcccaggctggccctgaactcctttctttctgtttcacctacctgaatactgggattactggcatgagccattatacctggcttggagagtatttaagcaacaaaccttttctggtttagtttgtttgtttgtgctttatccttatagatttggcttccatcgttcttctttcttggtctttgttctccaccttgagttttctctgctttttgcagacgtaaacgaatgcacagattttacagatgtcccctgtagccacttctgcaataacttcattggtggatacttctgctcctgtcccccagaatacttcctccatgatgacatgaggaattgtggaggtgagtttagcctccagaggtcttcatgttccctgggatttgggatggattgagggcttagtctaccgttccaagtttgattaggctttccctccaaatggcacctgctgttagctgttcacaaactgaataggatcctcaggaggggaggaagataaggtccatcacctttacattgctgtgaacggtgacttcaacagttataaggatacaatgtttattttggttcatggttctggcaatttcagtgtcgagtgggtggatccattgttttggggtctgtggccaggtggatcatcacgaaagggagtcagatggtagagcaaagttgtcatcacagggcagaagggaggcagagagggagggcaggggtaccaatgtccttttcaaagtcatacttccatgacctaacttccagctatcaggctagatgaagattccaccacccacctaacagtgtcacaggccagtgactaagcccttagaatatgtcacttttggagatgattaagatccaaagcacaacaggaggcttcgaggtaaagttggtttattggaaaagagggatagatgcctgtgaagagactgcccgaggctgttcacaactatggaaagttccacatggaaactttcatatataaccacagcaaacagagagaccatgcaaaggcattggctagcttgcctcatagcattgtgggtaatttcttcatggaggcttcttttgagaacagatggtaggctagtctgaatggagaactgaggttatgaggaaaggaacagagagggcggggacttcttgtctctgtatctgattggtcctttcccattttctctcctctagtcaactgtagtggagatgtgttcactgccctgattggggagatctcaagtcccaattatcccaatccatacccggagaactcaaggtgtgaataccagattcaactgcaggagggcttccaagtggtggtgacgatgcagagagaagattttgatgtggagcccgctgactcagaggggaactgccctgacagtttaactgtgtgttgtagataatgagcttggttctgacccacaactcatttagatttctgaggcttctctggcagccgccttctctgtggttttgggcaaacactccactgcatagctacatcctttgctcagagactagtttttttttttttttgattctctctgtctctctgtctctgtctttttcctctccttctctgactctctctgtatacatctttatcctgctccttccttaagccagggctttgctatgtagcccaggctggactcaaaactttcaaaatgccctctcttcacagcctcttgagtgctaggattacagatgttagtttccactcctggtgagagcatcctccttcctcctttaatctccctctcctctcctctccctccctccctccctccctccctccctccctccctccctccttccctccttccctccctccatgcctttatttcttccttcctgcattggattgaacctttggccccatgcatggtaggtaagagctctaccattgagctacatttacagccctttctattttcgtatatcagcataatttttccttgaatttcccaagctgactttaatttgtaatcctcctgtctcagtcttccaagtaggtgtgattaaaggcctgcaccattagacccattgtttaattacagtgttctttccttccaccgtttctctctctctctctctctctctctctctctctctctctctctctctctctctctctctctcttttcttcctttctctctgttccactaaggacactcacttcatactgtatcctttaattctttcctatacatttttctctcttgtgattttgtaacattgtttacttccagtttgctgcaaaaaaccaacagtttggtccttactgtggcgatgggtttcctggaccgctaactattagaacccagagcaatactctcggcattgtctttcaaactgatctaatggggcaaaaaaagggttggaagcttcgttaccatggagatcgtgagtaccctaaaaactcctctttgactggggatacaacattatttggacatgtagactaagaacacagagactgttcttcagctaatatttttttaactagtctcaaaaatacagacaagggggaggaggggcagccaatgtgtggcatcatatccttttacaagttggaatgttagacattagaactgaggacaatgggaaactttggaacgtttgtgggaacagggatagtgtgctaggcatgaggatctgagtttgtatttatagcaaaaatctagacatagccaagtatgtttgtaactcctatgtcttggagtgatgggcagagaaagggacatcacggggtcttgaggtcagctagcctgggcaaacatggcaagctccaggtatagtgagataccctgtctcaagagggtaaggtacagagtgacagagcaggcacccagtgtccttcttcagcctgtgggttggtacactagcctccctgccccatacacagaaaatgtgagaatgtctgaagatgctattacacagatataattccagtcctggagaagtggaggcaggagaattactgcaagataggctagcttgggcaagccccaatctatcctagggtacacagagagatcctgtctcaaaacaggggtggtggtggtgggaatgatgcaaaatagcacacgatttccagctgtactggctagttttgtgtcaacttgacacagctggggttatcacagagaaaggagcttcagttgaggaaatgcctccatgagatccaactctaaggcattttctcaattagtgatcaagggggaaaggccccttgtgggtgggaccatctctgggctggtagtcttgggttctataaaagagcaggctgagcaagccaggggaggcaagccagtaaagaacatccctccatggcctctgcatcggctcctgctttctgacctgcttgagttccagtcctgacttccttggtgatgaacagcagtatgaaagtgtaagccgaataaaccctttcctccccaacttgcttcttggtcatgatgtttgtgcaggaatagaaaccctgactaaggcaccagctatttagtaaaatctcatttctgttgtctccaagccatctcctgtcctaaagaaagcactgccaattctaattgggagcccgataaggcaaaatacgtgtttaaagatgtggtgaagataacctgtgtggacggatttgaagttgtggaggtaaagtaccacacaggcatctttttaacctcaggcttggatcagtattgtgagcacaagaggttgtcgctgcctgatcaaggtattaacccctcccaaggatgggccgaatcaaggtcgtcagtcgttcctgtgaggtctggatctcttggtccagcttgccctctctgccctcagtcttcccgtggacagggagctgaaatgccgggacagagttgtcttctcatcgcagctcctgggtacattgggttattcttctaaagatgttccaagtatcttttgaaaaggacttgtcattgatccaagaccagagattcaatttcattattggatttggttttctgtatgcttattaaattaatgttgatatttgttttcctccagggacatgttagctctacttcatactattccacttgtcaaagcgatggacagtggagcaactccggtctaaaatgtcaacgtaggtgtctcttcaaagcagaattcctctttcccctcccaaggtggatggaataatcaacacatcaaaattcaaatgcatgttttccctccaggctgtcaagaaagtgtcttgcatttttgaatgagtctgttatagagaattgtcaagccctctcctagtcttaggccaattagactaccatgtttcttctaaagaaaggaacaatgggatatgttgtcaatagctctaaggaagtacattctgagctcgcacaggaggctctgccaaccagagaactaggtttctcctggtctctttcaagagacatctacagccgtgagaggtggcccacgcctttaatctcagcatcgggaggcagaggcaggcagatttgtgagttcgaggccaccctgatctacagagtgagttccaggacagccaggactacttactcagtgtaactctgtctcggacccccaccccctcaaaaaaaaaaaaaagagccaactgcattggcagttttcagagggctagagaattgtgttagagaaggtgctgcaagaaggctggctttgagagattcatcagggggtgattatgggtgtggctatgggaggggtgaagatggaacgggtccctaactctttctgggagggagtgactgtctatttccctgattcttcttgtagctgtgtattgtggaattccagatcccattgcgaatggtaaagttgaagagccagagaatagtgtgtttggtactgtcattcactatacgtgtgaagagccatattactacatggaacatgaagaaggtggtaggttcttctaccagagaagagagagggaaggagtgtgggtgatttggaggtggttactgctttttctctctggttggagagacagagaagatattgtcatccttttggcttagtctaaggacacagttgtcttgtgggataggctcagtgttcaggatcattcagggtgtcatagaagccaccagcttagtgtcagcatgcaacaggagttccttaatagcactgatttcatgtagttatctgactccatagcagttatttcagataaaatccacaggaggacaggcatggtggtggaggtttgtaatcctagcccttgaaagatagggtaggaattgttgaaggtgagcctgagctatcccccttttcttcttcttcccccatcctctcctcctcatctctctctagtctttttgagatggattcacaggttttaaggtggccttttctatgtagcagaggctggcctggatctttctgcatctacctgctaagtgttgggcttacatagcagtgccatcattcccagctgaaggttcttttctagctcatttgatctgcttacctattcaatgtccaaaggggctggagctttgaataaagggggaaggaggagagatgtgcggaatgtgatatgttccttgtattattctaggggagtatcgatgtgctgcaaatgggagatgggtaaatgaccagctgggtattgagcttccaagatgtattccaggtaatctgggctgtggtgtgggtagaaactgtagctatacacgcagggagtaagcattgcatgaaattagctgttaccctcccggaaagggcttagccctgtctccgggagctcagcacagtgaagtgataggaactctggactgggaaattccttcaatggcatcaacttaggtcaacttgaagggaaatagaaaagtctgccatcatcaacagttgctgccacattagtcactaggaaagtgcagatcaaaccatgctaagagatctgggtgtacacttgtaatcctagcactctggattctgagaaaagattgtgagttgagaccaatctggactacatagtgaaagccctcgcccctgcaccacacacacactagataaggacttcatctgagtagcagttgaaggcagaaagcctgctgctgttatctgtgtgaggtgaagagtctctcagcattggctctagttgggtttttgaccttatgggctaagcatgaagtatacctcagaggggctgtgggtcaagctgtgaactgtaaagtactagctcatttggatttagtcattcatttaacccccctgttgagccagtttcctccgtaagtctgcttggcattggcaaaggaggtgttttggtgagaggaggaaaagtcagatatggaggtagttgactaaaattgattaagagatgctgaagaactctgccacccattgggtagaacatttgagtggctgaacttttcagaggtcaacatcattcgatctatcttgttttttttttttttctacctagtctgtggagtacccaccgagccctttcaagtgcagcagaagatattcggaggacaacctgcaaagattgaaaattttccctggcaagtcttctttaatcaccccacagctggtggggctcttattaatgagtactgggtgctgacggccgctcacgttgtggagaaaaactccgacccttcaatgtatgccgggatcacggctttgagactggctgacttggaaaatgcccagaggctctacaccaagcgtgtgattattcatcccggctggaaggaagacgatgacctaaacccacggacaaattttgacaatgacattgccctggtccagctgaaagaccctgtgaaaatgggacccaagttttcccccatctgcctaccaggcacctcctcagagtacaacctctcaccgggtgacatggggctgatctcagggtggggcagaacagaaaagagactccatgttatcaacctcagaggggcaaaggtaccggtaacctctttagaaacctgcaaacaggtgaaagaagagaaccccacagcaaggccagaggactatgttatcactgacaacatgatctgtgctggtgagaagggtgttgacagctgtaaaggggacagtggaggggcttttgctttccaggtccccaatgtcaaggccccaaaattctatgtagctgggttggtgtcttggggaaaaaagtgtggggcctatggggtctacacaaaggtaaagaattatgtggactggatcctgaaaactatgcaggagaatagtgggcccaggaaggactaatccatagggcgacaactcccctccagggcatagcaagctcactgttctcagatcctatggtggtccccttatttcacaacaatggagagaagatgtgggagtatggttaatgctgaacttgattgtcaaaaagtctgcatggaggcagagttgatcactgagctgtgttggttattcagttactattgctaacaacatggcagagacccttctatcttgcgctattccacagggatatcttatccgatcttccctcatttaacctgcttgaaattcctgaataacttgcagcaaagcatgcttccaacctggttctggttgtatggagagccacgaaggagagagagggagatttgggggcatagcatcatggaattcaggcatcaacagcatggaactctgcatctctaacaagatgcagacagggaacacagcctttttttctttctagtgagacttactgaatactcggaatttagaaatgactaccttaatttttctctgtgagttgcttcaatatgtttcctagaaatcaattttc

SEQ ID NO: 3 - DNA, 82774 bp, Homo sapiens
  source 1..82774: mol_type = other DNA
agaaaaataaaaagaatgcagcaggccaggttagcaggaacgttaagacggtgacggagaacagcaaagcctggaagcaagccgccgtggagaaggaagaactgtgctgaggtgagttgctgtgacaacccaggctgattttgagtatgtaaacaccaaaccttgttcttggctgccgctcagctcagcgggctttggagcctggctgcccagccaccacttcagggatgtgctgtttttagggagggtgtgaccctacaagatgtttctgagccttaatgcttttttgtgggagccaatgcttaatatggtggctagagttacctgaagaatctataaaaaatgaccgaagccccttctgctcaccctcccactcatcagagttggcttccgtgggtctgagtgggaaggacttccacttttaacagcatgagacacggttctgacagccccactaacatccgaatgcaggccgcagtgctcagtcctgaggataaaattctcagcttggagattggggttgatgccttacctttattagcaccagatgggtttgtaacaacccagaggtttgtaagaacttgttggccgggcgccgtggctcacgcctgtaatcccagcactttgggaggccgaggcaggcggatcacctgaggtcaggagtttgagactagcctcaacatggagaaaccctgtctctactaaaaaaaatacaaaattagctgggcgtggtagtgcatgcctgtaatcccagctactcgggaggctgaggcagaattgcttgaacctgggaggtggaggttgtggtgagccgagatcacgccattgcactccagcctggcaacaagagcgaaactccatctcaaaaaaaaaaaaagaacttgtttggcagcactgtaactgttccttctttttgattgtttgtttaaagcagggacttcagaaatttattagcaggcgaaggatgatgacctttagtacactccaaacctgaggatcttctactagaatgggacctttataatccctaatgctagggacattcaaaatgcgtgttttttttttttttttttgagacagagtctctgtcgcccaggctggagtgcagtggtgcaatctcggctcactgcaagctccgcctcccgggttcacgccattctcctgcctcagcctctccgagtagctgggactacaggcgcccgccatcacgcccagctaattttttgtatttttagtagagacagggtttcaccgtggtctcgatctcctgacctcgtgatccgcccgcctcggcctcccaaagtgctgggattacaagcgtgagtcaccgtgcccggccaatgctgtggtctttcaagcagctgctgggatacatttaatttgtacaagccctcttcaggggttgtagtcaagcacagggagtggatagaactgtattattcagtctctggacttcactcagttccaagtgctgtttgtgtcagggaccagatctatcacaacgtgcattgttagcgggaacgttttcttatttcctgtacaatagttgtgagattacttattaatcctaaagttgtgaggtttcatctgaagaaacagaaatggactgtttccattaagtctggtaaatttggctgggagtggtggctcacacctgtaatcccagtgctttgggaggctgagacgggagaatcactggaacccaggagtttgagaccagcctgggcaacatagcaagactctgtctctacaaaaaataaaaaaaatagttgggtggggtgggtggtgcgtgcctgtagtcccagctacttgagaggctgaggcaggaggatcacctgagtctggggagacagaagctacaatgagctacgatgatgccactgcactccagcctgggcaacaaagttgttttttttgagaccctgtctcaaaaataaataaataaataaataaaaataaaaaaaatataagcggggcacggtggctcatgcctgtaatcccagcacttcgggaggctgaggcgggcggatcacgaggtcaggagatcgagaccatcctggttaacatggtgaaaccctgtctctactaaaaatacaaaaaattagccgggtgtggtggcgggcacctgtagccccagctactcgggaggctgaggcaggagaatggtgtgaacctgggaggcagagcttgcagtgagccgagattgtgccactgcactccagcctgggcgacacagtgagactccgcctcaaaaagaaaattaaaataaaataaataaataaataaataaataaataaataaataaattgagcaccccaaacaacttttgttaatgtgggaactatatatcaatgtctactgtgttagaaaataagactaaaaactgggtgtggtggctcactcctgtaatcccaatgctttgggaggccgaggtgggtggatcacttgaggtcaggagtttgagaccatcctggccaacatggtgaaaccctactaaaaatacaaaaaccagccagacatggtggcaggcgcctgtgatcccagctacttgggaggctgaggcaggagaatcgcttgaacccaggaggtgggggttgtagtgagctgagatcacgccactgtgctccagactaggcaacagagcgagactccaaatcaaaaaaaaaaaaaaaaggaagaaaataaaactaaaaaaaaagtaaaagatatgattaattcagtaaaaatattaacagtaaaactactacacattatattaatataaataacatactttaaatgtaaaccactatatttcccaaaacaatcaaagaaataaagccatctaatgagaagaatgccactgttttacattttcataaatttatggcctctgtctgacttaatagaagatgactggattctcaaatctgcttctgcatttaatctgttgtaatatgttagtttggttaaaatatacaaagaaaatctggctttacacagacagagaaagtatctgcattttcagataattttggatattctttagcgctacatcaaaacttgacaagtagtagtttcttaacagttaggaacttttgttataataaaacccattggcttctcttgcactttgaatggatattttaccatgcatgactttgtaacatcacacatagatcactgcaaaatactggttccctgttgttaggcagatcttctaaatactgacatatttcattagaatacatatcaaaaaatcatattccttaaatttcaccattgatttcagcagaaaagtctgtatatattgaaaagtggtcaagctcatgggagtggatacaagttttccaaaattctaatttttacttgaaagtgtaaattttatcactggctacaaatattgtcatttgtttaccttgaagtgacaggctcacttcatacagtttcaagagactgtctgccagatgcctaagtctaaaaccatagtttgtctatcattctttcaagtaaaaatggtggtcggtgaaaaaagaagctgctaaatcaatatgcaacttgaataatcgcccaaatgcttttccttgtgacaaccaccgtactctaccagtgtgcagcagaggcggtttatgcatatttcccatttcttcaaacaagtttaaaaagatgtactcaggatcaggcatggtggcccacacctcccagcactctgggaggccaagacgggtagatcactttaggtcaggagttccagaccagcctggccaacatggcgaaaccccgtctctactaaaaatacaaaaattagctgggtgtggtggtgcataccagttaaaaaaaaaagatttattcaaggactgacatttgatacaattaacaatatttagcctgggcgacagagtgaaaccccatctctaaaaacaaaacaaaacaaaacaaaaacaaaaattagccaggtgtggtggtgcacacctgtagcctcagctactcaggaggctgaggtagcatcacctgagcccaggaagttgaggcggcagtgagctgtgatgcccccaccgcactctagcctgggtaagaccctgcctcaaaaaaaaaaaacaaaaaaaatttaccacttcatcaacgattcttaagtgaaactggctctgttttgattgtgagtgcatggcagtaaagaatgcagtgaccactggtacagtttggtgtcaccgtcctgatttgtgctaaggcgccagcagttttaccaccattttgcaacatcagtgcaagtgtcaacatagggaaaagacaaatacatcttagtagtatcatgaaaataatttttaccccaaagagattccttaaagaagtctcaggaacttttaggagtagtctatggactgcatgctgatatggaatgatttgttttaatctttcatcttctaatacccaaatccactagtctttcctttctccctggtttccttgactgccctgctgtgttttcaatctttttgaaacttctctttcactggtttcattggttttgaatacagttatctcttggtgtccatgaaggattggttctagtactcgcagcagacaccacagatgctcaagtcccttatataatatggtgtagtattgcatgtaacctatgcacatcttcacatacactttaaatcatctctggattactcataatacctaatataatgtaaatgcaatgcaaatagctgctatatagcatattgttttttatttatatttttattattgtattattatttagcttagaatccatgaatgtggaacccacaaatatggagggctgactatacacagtttcctggatttttttctactgagatataatttaccataaaattcacccttcaaagtgtaaaatgtaatgttttttagtatattcaaaaggttgtcgccgggcatggtggcttatgcctgtaatcccagcactttgggagccggaggagggcagatcacgaggtcaggagatcaagaccatcctggccaacatggtgaaaccctgtctctactaacaaaaaattagctgggcgtggtggtgcctgcctgtagtcccagctactcaggaggctgagggaggagaattgcttgaacccaggaggcagagattgcagtgagctgagattgcgccactgcactccagcctggcaacagagcgagactccatctcaaaaagaaaaaaaaaaaaggttgtgcagccatccccactatctatctaatttcagaatatcttcatcacctcaagtagaaaccccatacatgttggcagtcatttcccattctctcttaactcccagagcctggcaaccattcatctactttatgtctctatagattggcctattctaggtgtttcatataaatggcgtcaggcaatgtgtagacctttgtgtctggcttatttcacttagcatgttttcaaggttcatccatgttgtagcatgtatcagtacttcattcctgtttatggctgaataatatcccgttgtatggatactctgcattcttttttttaacatttaaaaattttttatagacaaggtctcactatgttgctcaggctggtcttgaattcctgagctcaaatgatctgtccacctcagcttcccaaagtgctaggattgcaggcatgagccactacgcccagcctggatactctgcatataatctacccattcatcagctgacaaacaactgggttgtttccactttaggaacattatgaagaatgctgctacaaacattcatgcattttgtagagacagggtctcactatgttgcctaggccggtcttgaactcctggcctcaaatgatcctcctgctttggcctcccagagtgctgcaattacaggtatgagcccatgtacaagtttttgtgtgaacatatgtttttatgttttcaattctcttgggtatatacctaggaatggatctcctggatctttttcttttttttccctttgggacagagtctctctgtgttgtccaggctgaagtgcagtggcatgatcttggctcacggcaacctccgcttcccaggttcaagtgattctcctgtctcagcctcccgagtagctgggattacaggtgtgcaccaccatgcccagctaatttttgtattttcagtagagatggggtttctccatgttggccaggctagtctcgaactcctgacctcaagtgatcgacctgccttggcgtcccaaagtgctgggattacaggcgtgagccaccgggctgttgcccacgctggagtgcagtggcatgctcacagctcactgcagcctcaactttctaggttcaagtgatcctcccacctgagcctccctagcagctgggactacaggtgtgcacaggaccggctaatttcttgtagagttggagtttcaccatgttgctcaggctggtctcgaactcctgagctcaagcaatctgcccgccttggcctcccaaagtgttgggattacaggcatcagccactgtgcttggccaatgttcactcttactttctgtgcttacttctggcatgggttggctgactacaatttgaatagacccatctttccgtttctttcaccgaaggcattttttctggctcctagatgttgctgacccccaggatccagtcttggccctccactattcttgctacactgcttctttggaaactcatctactctcaagtaacttaatataatctttatgccaaagacagatccacatctttagttctaacttctttttcagttccacatttcctacttccttgctggacagttttaatttgatatttcattaccatctcaaactctgtataactaaggcataaatttctccctaaatcagccttctctgggctttttttttttttttaaattaacagtgttaccattctccaggtcacacaacattcaaaagtgtgttttcctgccagggcatggtggctccacgtctgtaatcccagcactttgggaggccaaggcaggcggatcaccaggtcaagagttcaagaccagcctgaccaacatggtgaaaccccatctctactaaaaatacaaaaattagccgggcgtggtggtgcatgcctgtaatcccagctactcaggaggctgaggcaggagaatcgcttgaacccaggaggcggaggttgcagtgagctgagatcgtctcactgtactccagcctgggcaacagagccagactccgtctcaaaaaaaaaaaaaaagtgttttccttcttcatattggttctctgttatctagtcatgaaatcctgttgattcctcctttccagtctctctcaccatcactgtcaccatgaccatcaccactccctttttcctctgctgatttgcagttaaaacccttatggatctcacccttaaatccttgcaatggcctcctacctgatctctgcctgcaccacgtcttcccagcagtcctataccggggtaatcttccttcagctcctgctcagaaaccatcaatagctcccagctgactactcaacagagtcagcaatcctgtctgttctaccttcaaaataaatccaaaatctgaccacttctctccgcctctactgcttcccctggtctgagttgccactatctctggattattattattaatatatcattattatattcaatgtattatcattatatacttgcctcctgactgatctcaccctgcctttgcctcccttcagtctagccttaatgaagcatctagagggttctattcaacttaagtcagcaggtcactcctctgctcaaagccctctcaaggcctctattctcactcagatcaaaaggctgattgccagcacccgcaggttctgtccctctgcccgggccccactgtcctctgactcatctctcaatctggcctctacccttctgctccagccccaaagctttcccttcctggaatgttaagcaggtccagccttggtgccttcacatggtaagttccttgcctggaaggctctttgcacagataagctcaaatccttcctacacctcaggtcctttgtaaaatgtcaccataagtatcagtgaggacttccctatcttatctagaagtgtatacaacactacccctccccaccctgtaaccctcccccatcacacacttcttgttcttctttcctgctttttctatttttcttctcagtacttattaccttttgacataccatatatcttacttttcagtctttcaaagcagggattatcatctactttagtccctaccgtaccccagtgcatagtacagttcctggtacacaaaatttctcaaaaagtattagctgaatggccgaacaatgagtgaacaagtgctctgtactctaggcagtcaatacaatatttattaagcactcactatgtggttagcattgcattaggcattgggggaatatggtagaattttaagaggtgctttctattcttaaggagcaaaatcaaacaatgatgttctatgctaagggctaactgtatggaatagccaatgttgtagaggttaaagagaaatcaatctcgaccacagtggtcgggagaagtagttcttgaacagagaagagatgacggcattccaagggaggataatgtagtaaagacacagcggtaggaaggagcatggggcattcactccaagagactgggctaatttcaagggaggaaaaatattgtaacaaaatggatgggaaagtgaaaaaccaggcagagtctgaaattgataaatgggaaaaaaaaaatcaattgactaggtgtaggagaaggaaaaggacaaattaaagatgtttatgccactgatataatggtcttcaggtcttcaaacctttttgctggcatagctcctagaagaattttgaaaaactgtatatcctcctttcacattttaaagttgccatctaaaccttatgtttttatttctttatttttttattttcttgagacagtacttcactctgttgcccaggctggagtgcagcggcacaatcacagctcactgcagtttcaacttcctgggttcaagtgatcctcctgcctgagcctcccaagtagctaggactataggtatgtgccgccatgcccccaaaacaacagcaaattatgtgtgtgtgtgtgtgtgtgtgtgtgtgtgtgtgtgtgtgtgtgtgtgtttcaagacacagtctcactctgttgcccaggctggagtgcagtggtgcaatcttggcttactgcaacctctgcctcccaggttcaagcgattctcctgcctcagcctcccaggtagatgggattacaactgtgtgtcaccatgcatggctgattttcttttctttttttttttttgagatggagtttcgctcttgttgcccaggctggagtgcaatggcgtgatctcggctcaccgtaacctctgcctcctgggttcaagtgattctcctgcctcagcctcccaagtagctgggattacaggcaggcgccaccacacggggctaattttgtatttttagtagagacaggatttcaccatgttggtcaggctggtctcgaactcctgacctcaggtgatcctcctgccttagcttcccaaagtgctgggattacaggcgagagccactgcacctggccgcatggctgatttttgtatttttagtagagtagggtttcaccatgttggccaggctggtcttaaactcctgacctcaagtgatctgcctgcctcagcctcctaaagtgctgggcataagccaccatccctagtcagtgtgtgtgttttgaggcagggtcttgctctgtcgcaaaggctggagtgcaatggcacagtcatggctcactgcagccttgatctcctgggctcaagtgatcttccgacctcagacccctgagtagctgagaccacaggaatgtactaccacattcagataattttaaaattttttgtagagatggcatcttgctatattgcccaggctggtcttgaactgctgggctcaagcaatcctcctgcctcagcctcacaaagtattggcattacaggtgtgagctactatgtttggccgtgtgtgtgctttctaatgcctattgaaggtgtgttttaagtgcttatggcagatgtctgccatgcaatctaaatggcaaaccaatcagctggatcagtcttacttacaacacacctggcctgtccctcaacttttctattctttcaccaaaatggaagttccttatgttagagaacttacagagaaaaggaagacaaaggaaaataggaaggagagttaagctctgcctgacactgtctacttaagtgatgggtaactgattaggttcagtgcttagaacttcatataatgagatacaaaatctcattactgacccactctgccagctagaagagcacttgtagatcatggacatttaggtggggatatagccacctttgatcctttctgttcactagattaagccttgttgctagtacaggcaggagccaacataccttccacactccagcaatcctgtacaccttgggctgagtcatatgctgaacagttattcatgaatacagattcttacttagaactgaagaattacctgctccaaacccttcattaggtagataagagactaaggtccaaaggggataactggcatgcccaaggttaacagagcagagctcaaattagaatccacatcacctgatttccattctactattcttgccacatgccttggcacttggcagtgacctgggagtgaatcactaataaccagctgtgtgctcttttaaagctacagctctattattctttgatgtccagataacaatctatgctccagcacctgtttatagacataagcacacccatttttatgtttgcttatcctcctattgaaaaatattttaaaagttcattttaatgctaaatttaggtgtactttctttgttaatctaattcttgagcactctgcacccttcagcagttcatttctgaaagttacctccacctaaatagctcaagcattgtgacagctgtgatacaggactcatggaaactgggacaagtgatcaaaaatgtctgagggaggaacaatagaggggacattttaaaggtaagctattggatagttgttacctgtgagaaagaaagaaaaagggttaggttaagaaatgttagttttttactctctcaacccagccaaacaacctaaacttgaactgtcccaaaggcctaccaaaattctttaatttcttcacttaagctgagtgctcttaataagcaagacttctgaggtgtagtgctagtgattaatgttatacacacccgttggctgactggtgaaacctgctgcaataactaaaaattattctataaaaatgtatagacagagagaatgttaaagctaaaagaggccgttgactcatttctttgttttagtagaacaggtgcaacagattgaggcactttaagacatctaaatggctttactagcaaagataaaaatcacacttgcctgtactcagggaattttatcacattctaattctttgtaaatcagtgaatcccctggtgcaacttctagccagattatctgggctttggaatcagaattatctagtttaaaatttagctctgcagcttgggcaaattacttacattctttttttttttttttttttttgagacagagtctcgctctgttcctcaggctggagtgcagtagtgcagtcttggctcactgaaacctctgcctctcaggttcaagcaattctcctgcctcagcctcccaagtagctgggactacaggcgtgtgccaccatgcctggctaatttttgtatttttagtagagatggggtttcaccatgttggtcaggctggtcttgaactcctgacctctggtgatccgcccgcctcagactcccaaagtgctgggattataggcgtgagccaccgcgcctggcctacttacattcgttaaacctcaatttcttcatctttgaaatcgggaaaataccagccatcttgcagggcatcttaaaggtgaaaatatttggccgggcgcggtggctcatgcccacccagctctttgggaggccgagacaggcagatcacgaggtcaggagatcgagaccatcctggctaacacagtgacgccccgtctctactaaaaatacaaaaaaaaagccggggcgtggtggcggatgcctgtagtcccagctactcgggaggctgaggcaggagaatggcgtgaacccgggaggcagagcttgcagtgagccgagatcacgccactgcactccagcctgggagacagagtgagactcagtctcaaaaaaaaaaaaaaaaaaagcgaaaatatttgcaaaagtagcatacatgtacttccttcaggccacttaaaatacttatgcatgtctaaatattttatataagcatacctacacctaacttcttaaaaattgagtattctttttttgagacggctgtcgcccaggctagagtgcagtggcgcgatctcggctcactgcaagctccgcctcccgggttcacgccattctcctgcctcagcctcctgggtagctgggactacaggtgcccgccaccacgcctggctaatttttttgtatttttagtggagacggggtttcaccgtgttagccaggatagtctcgatctcctgacctcgtgatctgcccgcctcagcctcccaaagtgctgggattataggtgtgagccactgcgcccggccgaaaattgagtattcttttaatggattttaagatataaaatctcaggctcagaaatttgagccacctaggggtgagaaattttggcctttgcccgcttcgaactgacttaactaaattaaatctatagaaagtaaaaaataaaggtctgtgaatgtacccagtactctcaggaagaagcatatttgccatgaagctaaaaaagcttcagtttcactccccttccaaggctctggggggtggggtgggggcgggagctagcaacgtgctcacatggtcatatatttttgtaaaacttatagaagatatttttgtattctttttcttaaagaagatatccaagattgtataagcttcagatcccagaaatcctagatttaaaaaaaataatcaaccaccaccccaacaaaattaggcacatgcctgaaaattctgctgctactgccagaattctgcgggtaggggcttcatccaaggtgttcctaataataggcagagtccccagattagttccggtgaggcttttgggaggggttatttggcgcggtgttggtgttggtaggatcctggctgtgaggctgaggcaggcctgaggagggctggggctgacaggtaggcagagttggctgggatgtgaggtgcaaggggtggtacttcggaaacaaactttgaagaggagaaggggcagcaagactgtgagtctggactttgtgatacactgtcacccctagtttagtgtgcctggttagggagaatcaagcagcatggaacccctcttcctttttcactaacatttttctgtatagtggttgaaacccagtgttaagagactgcatgacattggaaaagaaggggaggagaaaaagagtccatatgaggcaagaacagaacgcagccagaattagggcaggcagggaaaggaagggagtgagatgtgggagtcgggggggagttgaggtaacctgcattttatatgctagagctacgtattttagatgcaggggcaactgtttcggtccaggagtggaaaggactgtagaagcaatctagcacagctgtttctcacttgggaaaactgaagccctcagaggcagagggaggaatggggagcggccaggccaggacaggactcagcccccagttcctcttctcaggcgtccgattccttctgatctttctctcctgccctctctgttactgcttcctcctgttcttacccttatatacacttgaagttttatccccattttttatgcttatgggattgtacactttctggttctctctcaagtccaaccagtatgtggtaacctgtctcttcccacttcatttgtggcactggtttgcagtggacaaaaggtccgtgctcctcttctaacctaatctggactgggttgcccaaaggttgccctgccacactgccaagtgcctaattagctgttttctctccaacccctccaaacacttatcatgagtaatttctcttgtctttagagttgccaaatctaatctctgtaaatacaaatgtggtgagacttcttctcaggagtttcagcaaatgaaacaataaactcttttttaccctgctaagattctaaagataaccatgagaatactcctaattatccttataaatttgaataagtgtggttgttgggttctctcaccctttttatatcccttcaaaagaaaatacaagtttgaattctataaaatatttttctggccgggcgcagtggctaacgcctgtaatcccagcactttgggaggctgaggtgggtggatcacaaggtcaggagttcaagaccagcctggccaacatggtgaaaccccatctctactaaaaatacaaaagttagctgggcgtggtggcgggcgcctgtaatcccagctgctcaggaggctgaggcaggagaatcacttgaaactggaaggcagaggttgcagtgagctgagatggcaccactgcactccagcctgggcgaaagagtgaaactccatctcaaaaaaagaaaaaaaaaatttctaatatttatggaatgcactctcttatataccaacatacatttgtagcattttttttccttcagagtatgaagaaatcagtaaaaatgggcaaagcacaaatgacaactaatggattttgttaagtcctatgtgtcactttaagaacttgaaactggctcaaataaaaaccattttatttggttattaaaatgagacttaaaaacttaaaacaagattttaagtgatcttaaaatgtcttatcctacagaagattttagaggcaatgtagtacaaaaagctcttccttttctctgaagaatttattgagtgctttgggagtagggtgagttttttttttttttttaacatatgtttgattcaattaagcaaaaatattgtttcatgtctcactgaactgaatacattctactatccattggttttcaatgttcacttatttattttattttagtagagactgggtctcactgtgttgtccaggttgggttttcaaattttatgtctaacacagtgtgctaaatacaactgagtttcataagccatttttcccacttctgtacatggcactggtctcaacctgtatcatgcataagaattacctaggatgcggccgggcgcggtggctcacgcctgtaatcccagcactttgggaggccgaggcgggtggatcatgaggtcaggagatcgagaccatcctggctaacaaggtgaaaccccgtctctattaaaaatacaaaaaattagccgggcgcggtggcgggcgcctgtagtcccagctacttgggaggctgaggcaggagaatggcgtgaacccgggaagcggagcttgcagtgagccgagattgcaccactgcagtccgcagtccggcctgggcgacagagcgagactccgtctcaaaaaaaaaaaaaaaaaaaaaagaattacctaggatgcttattaaaaatgcagattcccaattcctgaagggaggtcatgccttggcatcttacttagcgaatcagtgctatacagaaagtatgagagactggttcatatcaaagaatattgtgaaactctacactatatttgtgaagatatagaaaacccgttttatggctaaaaatcatcattttactactactaagcttcattattagtagatggagtttttttaaagggtcatttttcacaaagaaaaatttgttttgtcttttaacactttaggactgttacttcatagtttatccggggcagagaacaacagcgggttactctcaaacctgctctggagtttcagactagcagctgacatttttggggacctttctttaagcttgacattgtaaacactttgtatgtattaacccacttaatcctcaaaacaaccttgatgagtaggtatccttatcttacggaagaggaagctgaagcacagacagggttagtgacttacctaaggtcacagtgctggaaggtagcccagctggaatttgaacccagacagcatgtgggttcagagtgttttcatttttaactactctgctatattaccctctctagttttcagtattcatattagcacctcagccttccccagatgactacaaatcccatacatatgtgtatacacacatacccagggtcattcatgaaatctgaaacttcgggtgttcaatttgactttatagaaccttctacctctcctggctgatagtatctctttctcatttcacaaattaaacttcctataacactaccttaaacatgccacccctgctcaaaatactctggtggcttcctacgatctataagatgaaagctaacttccttagcttgccattcaaggcccttcacagtctttccagtcttactgtttattctatccctacttgagcacaaagcatttttttctttgatcatgcatagtccttctttcttcatttttttaagtgtacaattcagtggattttagtatattcagtgttatgcaaccatctccactatctaatgccagaacattttcatctctgctatctaatgccagaacattagaaaccctgtaccgcatagtggccattcccaattcacccttcctcttatcccctagcaaccaccaatctattttctgtctttacgaattagcttattctgggtatttcatataaatggaatcatacaatatgtggccatttgtgtctggcttgtttcatgtcacaatttttcaaggttcatctgtgtcgcagcatgtgatcaggatttcattgttttcttatggctgaataacattccattgtgtggatataacattttgtgtattcattcaatttgtcccaattggtggacaactgggttgtttccacttttggctattataataaagctatgaacatttgtgtacaagtttttgtgtgaatctatgctttcagttcccttgggtgtaaccctaggaatggaattgctgggtcatatggtaactgtgaactttttgaggaactgacaaactattttccacaagtggctgcaccattttacattcccaccagcaatgcttgagggttccaatttctccgtatcttcaccaacatctgtttgtgtgtttttgattattgccatcctagtaggtgtgaaatgatatatcattgtggttttgatttgcatttccctaatgactaaagatattaaacagcttttcacgagcttattggccatgtatatgtctcttttagagaactgtctattcatatccattttgtaaactgggttatctttttattgttgaattctaagagttctttagacatctgaatactagacttatgatttacaaatattttctcctattctgtgggatagctttttactttcttgatagtatcctttggtgcacaaaagcttttaattttgatgaagtccaatttatcactgatcataccagctggaaatctacttttttctatgtcagcatctcaatattacttgatgatctggggagaatttttgaaaatataaaaataatatacataaaattttgatataaaacaagagggccaagacttgaagaaatctggagcttctgttgagacgatgacctggggtcccaatgattactgttaggatcttaatgtacttagtggaaaggttgagaggcgctggcctacggcaggcactcctacagtaagactgaacctaaactgacattggtcagtttacttgggaagttgaccatatgttttttgtttgttttctcccaggctatagtacagtggcgtgatcttggctccctgcaacctctgtcttccaggttcaagcagttctactgcctcagcctcctgagtagctgggattacaggtgtgtgctaccacacccagttagtttttgtatttttagtagagatggggtttcaccatgttgcccagggtggtctccaactcctgacctcaaatgatccgcccaccttggcctcccaaagtgctgggattacaggcgtgagccatggtgcctggccgatggtatacattttaaaaataaatgtatgctatctaggagttcccatgttttgctattatttcctattctttcagagcaccaatagtcaatgaagaattaaaagtgaagtcagattatcctttagctaaagaatggggatttctagtagtacggttcaatatttttggtcagggccccatatgtttatactccaactttaatcaatcttttccacttctgactgagggatatgctgtaggaactttatgtgtactatttcagttggcctctgctggcttataaacagtagttgatatttagggacagtaatccagagtagtgtccaagtccatctgagtttagaattgctaccacagcagaaattggaaacctcgagagttataagccatttaccacatctacatggatgccacttctccttaaagcatatacaaatatatagagatcggaactttaaccttctgggatctaatatcttcctaagatttgcatacagaatgtacacatggatcttctattatagcaaattcttttttttttgagacggagtttttgctcttgttgcccaggtggagtgcaatggcgcgatctcggctcactgcaacctctgcctcccgggttcaagtgattctcctgcctcagcctcccaagttgctgggattacaagcgcctgccaccatgcccggctaattttttggatttttttttttagtagagacagggtttcgccatgttggccaggctggtctcaaactcctgacctcaggtgatccacccaccttggctttccaaagtgctgggattacaggtgtaagccaccgcgcctggccagcaaattcttaattgcctgtaaaattactatctcactatgtattattttcggaagcagatatgaccgtgtacagttttcttataaaagtgccatagcaacatgaatactcagtactgacaagcatctttaattgacaaaagctttttttttttttttttttgagacggagtctcactctgtcccccaggctggagtgcaatggtacgatctcggctcactgcaacctccccctcccaggttcaagcgattctcctgcctcagcctcccgagtagctgggattacaggcgtgcaccaccgtgcccggctaatttttgtatttttagtagagacagggtttcaccatgttggtcagaccagtctcaaattcctgacctcaggtgatccacccacctcagcctcccaaagtgctgggattacaggcatgagccactgtgcccggccatgacaaaagctttttatttttaatttaatcttagcctatggttaaagtgaagcatttaaatagcctacttgatgacttcatgtgagccaagaacaaaacctgggtctgataatcttctacctactctctgacaaactgtccctacaattataatgcaatgacatttctatgagcagcctctattactaacagttattatacacttggttcttatacagaatacttcattcaagatgtccagagcttcatctagctcactatcttcaaagcttctgcttgcaaagggaggaacttacaccatcagtccattttaagccaaaaggaaattcttacccagaaattaattacttatcctttttttagtgtgttactctccacacccccttcctgttttgaaagcagggagaaataatgatgtatacagtatcttctgaactatacaaattacagataagctttaaaggtctctaggaagctactactgtttcaccataagaactccaagtgggccctaaatctcctggtccttgacttcagccactgctaggaaaatgtcaatacacacacactcctatcttaaaaactctgtgcttgagaagaaggatggtttgctttgatattagactagctttccctggcagctgcaactagggaacctaatttttgttaaagctacaagtcacaatttattacttatattaagaaacgtaaggagatcaatcaggagaatgctatattgcttaaggtggttgatgcaacacaaaaaagatggagccattagtccaataaccttattaaaaaaattcctcctctgggtgtggtggctcacgcctgtaatcccagctactccggaggctgaggcaggagaattgctggaacctcggaggtggaggttgcagtgagctgagattgtacctctgcactccagcctgggcaacaaagtgagactccatctcaaaaaaaaaacaaaaaacacaactcctctgtatctaaccttcttatcaaaagtgtgaaacagatggtgtatgtgatgatcatgataatgaacataataacaatgtgaacataataacaatgtgaacataataacaacaacatctctttattcctcagataacatccagagcaggaactctggagtcaggcagaactgaatgtgactttaagcaagttactcaatttttgtaggcccaactttcctatctgtcaggcctacaaatgggaaaaactaaaccataaggaatctaagagttttgtttattccaaagagtacaggatacaatgacctttctttttttttctgtcacccaggctggagtgccatggtgcaatctcggctcactacaacctctgcctcctgggttccagcgattatcctgtctcagcttcccaagtagctgggactacaggcatgtgccaccatgcccagctaatttttatctttttaatagaaatgggtttcaccatgttggccaggctagtctccaactcctgacctcaggtgatctgcctgcctcggcctcccaaagtgctgggattacaggcgtgagccaccgcgcctggccaatgacattccaaaaaggtactatcaggacatcaagtactacaaaataggcaccggaagaaatatgctaaattagtaatcctcaaactctagagtaataagtataacctggcttgctagaacagattactgggcactatcctcagagtttctcaatcagtagttttggagtagaccaaagaatctgcatttctaacaggctcccataagatacagatgctgttggtcacaagaccatactttgtgtctccttggaaagggagaaaataaatatttattgacagggaagggaagaacaattatttaagatgatcttgggtcaagcatggttaagtgtttacatagtttatcttatttagtccttacaacatcccaatgagcaacagttctcaaacttttccaggccaaaggagaatgaacacatcacaaaagagtatgcctaagcagtcttctagaaatagaaaatttctttgatgactgtattactttaaaaattcatataaattttgtattctgtttcaaaatactgctgctagttatgaatgaaatataaatctaaaaatatttatcagataaattgcttaactcttcattgcaattctttagtaaaattggcctgtgggaatataaagaaatgggtggttgaactctggtaatgagcttatggtgaaacagctagtacatatttatttgatccagcatttgaacctaggccagaagatctctaaagacaatgcacatgttactaccttactctgtcattgacctccacctacataaaaggcctatcatgtttttctctactgctcttttacgatcttctattgttctggttaaagaggactacttgctgttcctcagatttttctcaaaatttttttttctttttccttagattcagggacagacagggtcttactcttcctgatctccagattactctttgtagctggaaagctcctccgctttcatctctactttactagaatcttaccatcccctttaaggcccagctaaaatgtcactttctttcagaagaccaaataccattattgattgattgattgactgactgagacaaggcctcactcctgttgcccaggctggtgcagtgatgtgatcatggctcactgcagccttgacttctggggctctggtgcatcctctcacttcagtcccctgagtagctgggactacagacacatgctaccatgcccagctaatgcaaatatcatttttaaaaggcgactgaactggacgcctcatatgagctcccatggctgcccagacatgctttcatgtcagtgattatataattttttttgtaaattagcttatgcaaataatcttgtggaccctaacttatacatgcttctgcaaagaaacatgtttaacgataaagttatactggaattcaaaacatgatgttttatggaatgtaagacattggggtatagataaaaagtggttggaaaaaatatatatatttatttttagagatgaggtctccttctgtcatctaggttggaatgcagtggcatcatcatagttcactgcagtctcaaattcctgggctcaaatgatcctcccaccttggtctcctgaatagctgggactacaggtgcatgccatcatgcctggctaattaaaaacaaaatttatttatttatttttgagacagaatcttgctcttttgcccatgctggagtgtagaggtatgatcttggctcaatgcagcctcaacgtcctgagttgagcggaggaccccgggctccagtgatccttccacctcagcctcccaagcagcagggactacagacatatgccacccagcccagttaattttgttcactttttgtagagatgaggtatcactatgttgcccaggctggtcttgaactcccggactcaagtgatcctcttgctttggcctcccaaagtgctggggttacaggcgtaagccaccgtgcctgacctggaaaattgtatttaaaagaaattcttggccaggggcaatggcttatgcctgtaatctcagcactttgggaggctgaggctggtggattgcttgagctcaggagtttgagaccaccctgggcaacacggtaaaaccctgtttctacaaaaaatacagaaaaaattagccaggcatggtggctcacgcctgtagttccagctactcaggaggctgaggctagagaattgcttgatctgggaagcagacgttgcagtgagctgagattgcaccactgcactccagcctgaatgacagagtaacaccatgtctcaaaaaaaaaaaaaaaaaaaaagaaagaaagaaaaagaaattcccaaacgggaaggtttagattatgatgaaatttgtggctatgaactagaataaagtctaaacatgtagaagtaatatacctagacttttaaaattggaagggtccttgaaagtcatttaggacagtctccctattttatagcagtagaatttttggaccctgctttgtattatggtcagaagtctctttgtttcattaatgctgcttaattttcatctagcttacctttggtctctttatattgtgattccagtgctacctgaagaaagctttctgcactgaataatggatttttttctgaagggccagacctgactttggtccaaagggaactaaactgcaggacctcctttgattttaaaggtcgctaactttagtgatgctaattctgaacctctgagggatgaattgttacccccagctgcaatttttgatcagtctaacagccaagccaccatcatggccaagactagggaacactcacagtaagcagggtggccatctgctccatttggccagctctagctttggacactgagaggtggctcatatactgattgcatcttggtttaaccactgagagtgaaaagagaaaaggacaccaagggcatttatcttttccagccccacatgctcctcccaatctcagcggtaaagagcaggaactctggagtcaggcagaactcagtgtgacttactcaatctttgtagggctgactttcctatctgtaccaggagatcttaacagcactataattacctcacgggtaactggcaggtttaggtggggaactgcctgttgaccatttaggacaatgtctggtacacagaaaatccttaataaatgccagctattactattatcaaggggtagcaacattaacatacccaatcaacgtgaataagatcctcttctctgtataaccttttccatggcatttcattccctccctgagtcagttatgataccaatactgtctcctaaaactctgtctttagcccagcttctttcctgagctcaagaccaggcttcacaactcccaagatacctggaagtgcccttggaacctaaagtgaaccccaaaccagatcatttcctggcacttaagagtatctgatcctccacttgatctctggcattggtcaaagatacccttatctttccagctactcaggcaggaggatggagtctttttaaaattacgactttatcctccagctaataagttgccaagtcattcattcatacattcacctattcaagtatttatcgagccttttctacaagccaagtaatgtgttaaactctgggtacactgtggtaaacaaaacttccatggtttctgtcctcatctacaaatatataattacaaagtgtaatatatacttggaaggaaattccggtcagtatgagaaagtgtaacaggggacataattgaacatgagagtcaggaaagaactcagaggaagatgaaaaggagtttgtcaggtgactgaagggcactccaggcagcaggtaagcgtgtgcaaaggctctgaggtagggaagccttcatgcctttcctgaggaactgaacaaaggccatgtggctaaaaggttgtcagcttgcttgggacgaggctggggcagcaggcaggggcttaccagccaggtatggaagcccctgaagggttctgagcaggagaggcacaggatcggatcactctggctgcttttggagagtggactgagggggcaagaacagaattagagactagtcaggaggctacttgggtggtgctggtgacagatggttagtggctgtggtgatggagaatagtagatggatctgagacacaatccagaggttgtattgataggattgggtgactgggatgtggggagtgagtgaagaaaggcaacaaagctgattcttgggtttcaggcatgagcagctgtgtagatgactgtgtctacagaatctacctttcaaaaggttccggtattcctagaccatctcacaggagatgcccactttctcctctcagcacagccaccctgcctccaagtcattataacttcctctctagatcacttctttctccttagtttccctactacttgtctatgctgacttcaaatcaccccaggctgtattatctttttaaatacagctccagccatattattccccactcaaaaatctccaatgttccctatcacctacgtgagtactaactctttaccttggctttaaaggctctttaacctacagttccagcctgattttccatcacttctttaaagtcctgttttagtcacactagactactgactgttccttggctgtgttgccacattcacacctcagtgcctctgctcatgctattccttaagtcttaccatctcagcatgctgaaaccttactcatctttaaatgaaatgtcccatctttaaatctcacaaagctctgtacctctcttatggtgcttaaaatttattggggttattagtatacttatctcaggcccatttcctataccctaacagaccataatacctttgagtgcagggctcctgactcatactacacccactgctcctgcccttgcagggttaagaatactgctttacctgtagtaggtgcatgttactgaatttatatgagcaattcatggtattagttacattaaggagtgatgagatccaagctgttgaaggggagatgttttctggtagtatttgccagcaccagggctcatggcaaaattcctcttcagcatccttccatcaaactccttgcaagcatacaccacacaaacataaacacactccttttacagtcttctgactgctcaaaatactccagtgcagcagtccacataagcttactttttctttgaagtattgaatattaaaaattgcagcctcggctgggcgcggtggctcatgcctgtaatttcacgcctgtaattccagcactttgggaggccgaggcaggtggatcacgacgtcagtagattgagaccatcctagccaacatggtgaaaccccgtctctactaaaaacacaaaaattagccgggtatgatggcgtgcaccatagtcctagctactcaggaggctgaggaggagaactgcttgaacctgggaggcggaggttgcaatgagccgacatcgagccactgcactccagtgtgggtgacagagcgagactccgtctcaaaaaaaaaaaaaaaaaaaaaattgcagcctctaactcaagatttttcaaactgttgtaactcattaacaagtcatgaaatcaacttagtgagttattattaagggcaagtattctttcctgaaacttgtttcaaatacgtgtatacacatacaagtctgtgtgttctgggtcacaatgtaaaacatatttcttacgatggatcttagtcaaaaaggtttaaaagccagtgctttaatgctctgcattccaccccaagatcagcacacagaactgaagtaaaaaaagtaagatgttaagaaaatagtaattagactatctgattaaaacgtacacttgaaaatgtgaatgatatacctaactcttcccttggggtatttgcatttagggaggtgtttttaacctgaattaatctaatcagtggaaagtgaaccagaaatcattttggactacaggctttcttggtacctccagcaaggatttcctccagtatcccagttccctgagagagctgggttcaagaaccaggaactccactgctgaaaggctactggtttctaggttacaatacacagaaatggtaataacctttgtaagggaaacatatttacaaccaaaatgcactcctaccacgcacacatcaagcttaatcaatttatatttatatgtatgtatttaaactgtgcctactaggaatacaatcctacccgtccacatgatgagctatacctgataggaggcaagttgaagccccaagttgatctaaaaatgagaaatactatgaattactgaaggcaacagggtatgtgagataggaaggcagggtgtgggaaatggtagaatgagcaagggggctcgggagtgtggtagatgcattacaccaagtgtttattactttgatgattggtggtaatgagagaagatgagagaagaggagtgggatatggagaaaacaatttcctagtcatctgtatgccccgtgacagtacacagcaatagcccagcaggagtgcacaggcaatatgtgattatgtcaacaaacaaaagttgaattctttatgtcaacaaacaaaagttgaattccaagtcctaattccagccctaactccatttaacagattgccccttataactggttgctacttgtgttacattctgaatttattgttgagaaaccaacagtttcctaactaatgaatgtaatacaatttttttttttttttgagacagggtcttgctctatccttcaggctggagtgcagtggtgccacggctcactgtagcctcaaacttccaggcccaagtgatcctcccacctcaatctcgggagtagctgggaccacaggcatggcatgagccaccacgcccagctcatttttttattaattttttttttttttttggagacagagtcttgctctgtcacccaggctggagtgcagtagagctaacttggctcactacaaccttcacctccagggttcaagtgattctcctgcctcagcctcccaagtagctgggattacaggtgcccaccaccatgcccagctaatttttatacttttaggagagatggggtttcaccatgttggccaggctggtctcaaactcctgacctcaagcgatctgcccaccttggcctcccaaaatgccaggattacaggcatgtgcccctgcgcctggcctaattttttgtagagacaaataaaatgttgcccaggctggcctcaagcgttcctcccaccttggcctcccaaagtgttacgattataagcataagccgctgcgtcctgtcaaatgtaaacactaattgctaattacaatgtcaaaaataactgggtcagaaacaaggatgaaagagtaggaagttcaaagctggtgtagtgcaaataagcctagactagggtgctgataaatttggatgatgtctgggtgacactgagcaaactgcacaaccccagttccattccatctttaaaatcttacgattccacagaggaagaaaaaggtgatctttatttggaagaaaggaagatcttggtttgatatgtaataggaaagtaacaatgctattaggcaaggttgtttaaatatgaattaatgcctatcccattatctagattgggttaacaccctctggtgatattatatatcagtgtttctactgaatactggataaacgccaaacttctctctggcatttaaggctttccacacctgcccaactttatctcaaacttctcatggttcagacctctaaccctctgctctagccccagtcctgtttccttatcaccacttacagcttttgcttaatccttcccactcacccgctcctaaagttctataaccttcataaaacgttccaactgcttaaattttatgtatatatatgtacaggtacttcccaatcttggcccttctacaggactttatggcaatcctatgtggtaggcactgttgtcctcatttcatagataaggaaattaggcccagagggttttgcggcctgcgtagggtccttcagtttgtgagcagcaacaaggctggatctgatttgtttgccttcaaaacccatacttttttccattgtactatgctacctccatgtattaaaccatggagtgaggatgcggtaaaaaagcctataaaccagttgtaatacagcttgttgtggcataaattcagatacaccacatcctttgaaccacacgtgtaataaacgcttggaatagtatggatcgattttaaggaggttgttagtcctgtttcccaagtccagcattaaaatgatattccagggtaaatgacaggtaggtggcttggaaaataaaaaaagcaacatggtataaaaagaaaatagtaggactgggacagaaaagagacgaaagtataatataagctggcaataagcaaaacaggcgctcagaatatgaaatatggaatatggggctgaaaaggccgaaagggctaaagttaggggccctatgcctaccgatgagatgcgcgcgtgtgcggggtggttattaatgacagagcaggacacatggccagacagtggaactcaacagagcgacaaataaagacaggtcgtgggagcaagggtagagcctggcacaagagggcgggggcccgactgagaggccagagggcatggcaggggttgaagagaaagatgaagaggttcagagggcacagcgccccagactcgagacaggacttctgtcttccctcagtagctgttggtgtgcttcaggattcacacccgcacccggcacagccctcccgggtggctccgggaagagagggaggtcctgtccccattcctcccctactccccggggactccgcgaggggcggagggaggcaggagggtccttacccaggaagatggagatgatcagccgcagcgcctgttctgacgcgcccagggacgtcgccaacttgttaaggctcagctcctggaaacccgactgcagaacccccgccagcgccaccacagtcccctcgtccccctccgctgaggacgccatcttaactccgggagccccacagggaccccccagctccgcgcgccccgaatgcgggcaaaacgctatcgcttcacccccaattccggctcggggcccgcccacggcgtgcgcattggctggaggcccgccccgcggcgccagctcaccccgttattggccgacctgcgcagagggcggggcctagcgcggcaaggtaggaagagggcgggtctgaaggtttgtaaggcaaaggtgactcctgccgagaatgcacacggggaggctcagggctgggcggggcttggcgtcgggacccagagctgccattggaaaggtctgagcccgtggcccggcgacagttcaactccgttcgaaatgctcccaggaggagccctccggggcgaccgtccggccggccggttcgctgccttcccattggctgaggcgggagcaggcgagagtctggacgcgggggggccgcccgcgcgcgaggttactcccggtcgccggcgctggggttactggggcatgtaacggggaggcgggaacgcccgcgccgcctttcgcgcgccccctaacggcgcctcccggcccgttcttaaattcttaggttgttagactcgtcgccttcactcccggaggttcagcggaaagcccagtgccccaggaacagacattgtctgctccttttatttcatggatcccttttccatgcagtttcctgtagtaaaacatgaccttccccctagaggcgatgaaattaagatatgcctatttaacacttattattttaattaaaaattcaaataattttgcactgagtaatacatgtttatgataaaagttataacagtatagaaatgtaaaacagaagagtcctgtttcccctccctgcttttcattctcacttcctacaggtaatcctgttaagattacgccaaaaaaaaaaaaaaaaaaatctgtcgagcacttaccatatgccagggactgtgctgggcttgggaatagaatcaggagcccagagccacggagtgggaggatgcacaaataatagcatcaattaacgtgttattgcaagagaaggtaagtgctctgaaggaaagggtcaaggttctgtgagagtatgtaacaaaggaatgctaagagtttcttgcaataactcttagttacaataatttgtggcgcattcttgtaaaattacagcttatacttctgtagcacttgcactttataaagcactttcatccgtattatttcacttgctttggctgcgcaatagaatatttattatgatgatgtcctcttacagacacagaggcttggagaaattaagaaactgggtaagttcctttacaagtaagcggcagacagaatttaaacctaggtctgtcaaattccctacccctactcccattttgggcaagattttaaaaaacaaaatatttcattcacacggaaaagtagaggataatataacttctccaggttaagaaacaaacatcacctatacatttgaaaagccggtatatcccttcctgagggcatttccctccttcctttctcagaggtcaccactttgctgactttggtatttatcaatcccatgcctattttaatactttacatacagcatatatccagaaaggaaaattagtatagttttgcatgccttatattggccgggcacagtggttcatgcctgtaatcctagtacttagggaggttgaggtgggaagattgcttgagcccaggagttggagaccagcctgggcaacatagaccctgtctctacaaaaaaaataaaataaaatttagatgagcatggtggaacatgcctgtagtcccagctactcaggaagctaaggtgggaggatcacttgagcctgggaggttgaggctgtagtgagtcgtgatcatgacactgcgctccaacctgaaagacagagcgagactctgtcttgcaaaaaaaaacaaaaattatatatataggcctgtaatcccagcaatttgggaggctgagacgggtggatcacctgaggtcatgagttagagaccagcctggccaacatggtggaaccctgtctctactaaaaatacaaaaaaattagccaggcgtgatggccggctcctgtaatcccagctacttgggaggctgaggcacgagaatcacttgaacccgggagatggagtttcatgtgcgtccgtgtgaagagaccaccagacaggctctgtgtgagcaacaaggctgtttatttccctgggtgcaggcgggctgagtccgaaaagagagtcagcaaagggtggtggattatcattagttcttataggttttgggataggcggtgaagttaagagcaatgttttgtgggcaggggtggatctcacaaagtacattctcaagggtggggagaattacaaagaaccttcttaagggtggggggattacaaagtaccttcttaagggtgggggagattacaaagtacattgatcagttagggtagggcaggaacaaatcacaatggtggaatgtcatcagttaaggctatttttacttcttttgtggatcttcagttacttcaggccatctggttgtatatgtgcaagtcacaggggatgcgatggcttggcttgggctcagaggcctgacatggaggttgcggcgagccgagaccatgccattgcactccagcctgggcaacaagaacaaaactccgtctcagaaaaaaaaaaaaaaaaagctgggcatggtggcttacccctgtaatcccagtattttgagaggctgaggcgggcggatcacctgaggtcaggagttcgaaaccagcctggccaacgtggtgaaaccctgactctactaaaaatacaaaaattagccgagcatggtggtgggtgcctgtaatcccagctacttggaaggctgaggcaggagaattgcctaaacccaggaggcagaggttgcagtgagctgagatcgcgccattgtactctagcctgtgtgacagagcaagactccgtctcgaaaaaaaaaaaagaaaattatatatatatatttataacttcagtgaagcctaagcatatagtgtttatacagtccaattaaactgcctttacaaaattatgacagtaagagaaatctgatatagttgacttcatcttgctttttttgagagtctttctctgtcacccaagctggagtgcaagcacgtggtcttagctcactgcaacctctgcctcccaggttcaagcaattcttgtgcctcagcctcccaagaagctgggattacaggcatgcaccaccatgcccagctaatttttgtatttttagtagagatggggtttagccatgttggtcaggctggtcttgaactcctgacctcaagtgatctgcccgcctcagcctccccaagtgctgggattaacaggtgtgagccactgtgcccagcctccctcatgcttttaacctccaagctatctttggtcattcctgggcataaaccaaactgactttgagagaaatttagtttatagttaaacttaaagcagggataatagccctttcccaaactaagccacctttataaaactaatgaaaggctgcaaggttaggcttatgaaagggccctgaattccgctaaaatgtaggcataattaagtgattaccaaccgttgttcaggaggtcaccagatttgtaacttccccaattacgcctctagataacatcatattgtagaacttaagattgaccttttaggatgtcttttcagattttggcatttctgcaaaccccagctggactcgtgactcagccagtcctatggaccccacccagaggtggagtcagggcatgaggatcatttgccatacctctatgattgcatccccaacaaagcagcagcacttataccgtaggcccctgcccaccaaactgtctttgaaaaatcctagcctccaaattttcagggagattgatttgagtaatagcttcatgtaccatgtggcatggtcagccttgcatcaattaagatctttctctaatgcaatgccatggtctcagtgaattgattttgtctgtgcagcgggcaggaagaagcccacagggcaattacatatggtagtgtatggcagtgtcctaggccttcacattcactctcacactcttcacactcactgactaacccagaacaactgcgagtcctgcaagctccattcaggtaaatggcctatacggctgtaccatttttaaatttttaaatttttttaaatttttattgagatggagttttgctcttgttgcccaggctggagtgcaatggcacgatctcagctcactgcaacctccacctcccgggttcaagtgattctcctgcctcagcctcccaagtagctgggattacaggcctgtgccaccacgcctggctaattttgtatttttagtagagacggtttctccatgttgttcaggcttgtcttgaactcccgacctcaggtgatccacctgccttggtctcccaaagtgctgggattataggcatgagccaccgtgcccagcctttttaatcttttataccatatttgtactgtaccttttctatgtttagatgtgtttagatacacacaaatagttattacaattgtattattattgctcacaatattcattataataacatgctgtgcaagtttttagccaaggagtactaggctatacccttgtaaactaaaagtaaaattcgaagcccccactaactgacctaatggaccctctcctggcaaagcagaccccagagtaaccttgaaaactgagttcttggtcatgatgggatgaggtcaggcacgcctccttatgctcacccctccctccctaaccggtttaggctttctaacctaagggctaaacagaaactagccctttcaaaagactctaccagtgatatcaaccaactgtctgatattgctcctccttttatgcctgataagagactcttgaatatgaagtggttctgaccagtctacagagaatgcagtgagggttttcatgttctctgcttcaccttttgatgccagagggccaaaaactctaccttagatcatcttaatgccaccattttttgaacatggggcccgtggagaagcatgaagctcaattgcacatgagtatgtttctcctttcataaaactcatcactcctataatgtactaaatacgtacatttggccaccccactcagcataaatttctcttccctttggccctcccttgaagtatctgtttctggtttgtggctggaggctgtgcttcccctcccgtcagaatggccaccctgcaggctgcaaccctttatgagaaataaagctctcttttttagatttatgaacctcatcacctgatgaagctggggacattgagcccctaaattctgattgatcttctttgctagtgaaagaggcctccccatccccagtggaggcatcccacctgagaggactaaccctgcattgcctacgaaactgtaatggcctccctgaggaagttgccatgcaggacaaagcagatgctcctcaggacccttccccacctgccctctttgcttctagacctgtaactagactgaaatcccagcaggcccctaaggtgagggacaaagtgtgacccatgaggaagtgtgcaacactccaaaagaacggcttaagatgtctaatttatacagacagaaattttgggaacacgtatgggaatggatattgaaggcatgggataatggtggaaggaacataaaactagatctggccaaatttatatgggcttactaaatagaggttctacatttaatgttgcagctcagagagttaggaagagctctaacaatttgtctagctatttggctgagacatggaccaaaggtgggtcataatgagtaaatcagaaattccaaacctgccttggtttaatgtagaggaagatactcaaaggcttaggaagattgaaaatttagaggaattgtcatttaagaactattcacccacactggaaggatccggaagacatatctttcaccattattgtaagagataaatttgtagctgggcatggagggtgatgcttgttatcccagcactttgtgaagtccagttggagaatagcttgaggccatgagttcaagagtagcctggggagcatagtgagaccctctctctacaaaaattaaaagaacaaaacagggctgggtgtagtggctcatgcctgtaattggcactttggggggccgagttgggtggatcacctgaggtcaggagttcaagaccagcctggccaacatggtgaaaccccttctctacaaaaatacaaaaaaacaaaaacaaaaacaaaactagccgggcatgatggcagtcacctgtagtcccagctacttgggaggctgaggcaggagaattgtttgaatccgggaggcggtggttgcagtgagccgagatcgcaccattgcactccagcctgggcgacagagtgagactccgtctcaaaaaacaaaaaaacaaaacagctgggcatggctgtgtgaaccccacatatctgagatggtctcagttaatttagaaaatttattttgctaaggttgaggatgcgcacccgtgacacagcctcaggaagtcctgacgacatgtgcccaacgtggtcagggcacagcttggttttatacatcttagggagacatgagaaccaatatatataagaagtacattggttctgtccagaaacgtggggatagctcaaagcagggagagggcttccaggtcacagataggtaagagacaaatggttgcattcttttgagtttatggtaagccttaccaaaagaggcaatcagatacgcatctatctccatgagcagaggaatgactttgaatagaatgggaggcaggtttgccctgagcagttcccaacttgacttttctcattagcttagtaattttggggccctaagattttcctttcacatttacccccttttcttttctttctttctttttttgagagagtctcactctgtcacccaggctggagtgcagtggtgcaatctcagctcactgcatcctccgcgtcctggattcaagcaattctcctgcctcagcctcccaagtagctgggattacaggcacctgccaccatgcctggctaatttttgcattttcagtagagatgggatttcaccatgttggccaggctggtcttcaactgacctcaggtgatccacctgcctcagcctcctgaagtgctgggattatgggcatgagccaccatgcctggccaggatcagcaatgttttatgtatgtatttatttatttatttatttattttttgagatggagtcttgctctgtcgcccaggctggagtgcaatggcgcgatctccgctcactgcaagctctgcctcccgggttcacgccattctcctgccgcagcctcctgagtagctgggactataggcgcctgccaccacgcctggctaattttttgtatttttagtagagatggggtttcaccgcgttagccaggatggtctcgatctcctgacctcgtgatccaccctcctcagcctcccagagtgctgggattataggtgtgagccaccggcccggcctcagcaatattttaaacaaaaagtcaaaaagattagttcagtccatgcagttaattcctgttctgcttgatattcatgaacattttagctccccattagtcccaaaagttattcctctattccaatgtcacaatctccaaagttataaaaaaacctgcattcaagagcacctgtagagttttatagctgattataaaaccaccttctaaagaggaccaaaacattacaattgtccctagaagacaaaaagttttagggcagccatagtcaaagacacattgacaaggaaatttgttacttctgtggtacacaataattttaacataatgattttgattattactgataatgtacaccaagtcatatcagaattacaggagtttcccataattttggaacacataccaatatcatatttatacaaatacagtccaaagaaaaccaaacaccattttatatttgacaatgcttcttgtatcatttttgtaacaaataaaccaaattatgtcatttttagaatttagggaaactaatatcttaaaggaataattaggtcagaaaaagacataatttatcatttgattttggaaagtttgtcaaatatcaaagctttacaacacttgatatcaaaataggatcacaggtcattgtaaaataagtcatacatttaaccaaagtgataactgaaggattaaaaaaaaaaaaaaaggtaaaaaccttcattctttgagaggggagacaattttccaaatgataagccttaataaaaacagcatgaagccaattaaatttggttttcaaaattttataaaccatctataaaattttaatcttgaccataaaatataacttccatgagccttttacaacctttataacatttattgaggagtcagttaatgcttcaagaaaaccttgttaatctgacacaggggcccatatgctagtcttgcatcagtgtgtctttgacattcatgattaatttatagagaaactgaacttgttttatctttcaaaagcagcccttacaatctcatgtgcccacctcttctgcaatagcctctggacctgaggagttgaatagctttaatttctggacttggtgtctgttttttttttttttttgagatggagtttccctcttgttgcccaggatggagtgcaatggcacatctcggctcactgcaacctctgcctcacaggttcaagtgattttcctgcttcagcctcctgagtagctggaattacaggcatgtgccaccatgcctagctaattttctatttttagtagagacagggttcctccatgttggtcaggctggtctcgaactcctgacctcaggtgatccactcgcctcggcctcccaaaatgctgggattacaggtgtgagccaccatgtctggccgctttttttcttgatatttgttagcaaaaattactggaagcagtttcagttcagccagcaaagccagaaataaaccttcactgtcctaccttagaggtatatcaactctccagctcattttttttttttttgagacagggtcttgctctgtcactcaggccggagtacaatcatggttctccatgactggagtgatacaatcatggttctccatgactggagtgatacaatcatggttcactgtagtcttgacctcctgggctcaagtgatcctcccacctcagcctcttgagtaactgggactatagacatacactaccatgcaccaccacacctggctaatttttatttttgtagagatggggtctcattatattgcccagtctggtcttgaactcctgggctcaagtgatcctcctggctcagactcccaaagtgctaggagtataggcataagccaccatgcctgtccaactccccagctctatgtcataatttagttttctgggatcttgattacctttcccttccacaagatatcacattgattgccaattgcaatcaccattacactgatgacattatgctgatcagacctagtgaacaagaagtggcaactattctagaccaagaagtggcaactattctagaccaagaagtggcaactattctagaccaagaagtggcaactattctagactttttttttttttttgagatggtggctcgctttgtcgcccaggctggagtgcagtggtgcgatcttggctcactgcaacctccgctcccgggttcaagcgattcttctgcctcagcctcctgagtaactgggactacaggcgcccgccaccacgcccggctaatttttgtatttttagtagagatggggtttcaccatattggccagcctgatcttgaactcctgaccttgtggtctgcccaccttggcctcccaaagtgctgggattacaggcgtgagccaccacgcccagcctattctagacttattcataagaaatttgtgtatcagagagtgggaaataaatctgacaaaaaattaaggatctctactttagtgaaatttgtaggggtccaatggtgtgggtcatgttgagagatcccttctatagtgaaggataagttgttgcatctggcccctccaacaaccaagagaggcacaacacctagtgatctttggatcttggagataacatattcctcatttgggtgtgtcactccagcccatttactgagtgacccaaaaagctgctagcttttaggggagcccagaacaagagaaggctttgcaacaggtccaggctgctgtgcaagctgctgtatcacttgggccgtgtgatctagcagacccagtgatgcttgaagtgtcagtggagaaagggatattgtttggagcctttggcaggcccctataggtgaatctcaatgcaaatcgttaggatttggagcaaagccctgccagccttggtggataattactctgcttttttttttttttttttttttttgagacagagtctcactgtgtcctccaggctagagtgcagtggtgtgatcatagttcactgcagcctcaacctcccaaggtataggtgatcctcctgcctcagccccccattgaggagctgggactacaggcgtgcactatcatgctaagttaattttttttttttttttttttttttttttagtagagatggggttttgccatgttgcccaggctggtcttgaactcctgggctcaaataatccacctgcctcatccatccaaagtgctgggattgcaggcatgagccactgcacccagcctactctgcttttaagacacgactcttactgaatttatttatttatttatttatttaattttatttttattttaagacggagtctcgctctatcacccaggctggagtgcagtggtgcgatcttggctcactgcaagctctgcttcttgggttcatgccattctcctgcctcagcctcccaagtagctgggactacaggcgcccgccaccacgcccagctaattttttttttttttttgtattttcagtagagatgaggtttcaccgtgttagccaggatggtctcgatctcctgaccttgtgatccgcccacctcggcctcccaaagtgctgggattacaggcgtgagccaccgcacccggcctcttactgaatttaaactgcaggaaaaaaaaaaagaaaaagaaacagctctcagcctgatactgagtctccatagagactgaacacttacccatgggccgccaagttactatgcaacctgagctgcccatcatgagctgagtgttgcctgacccaccaaaccataaagttgggcatacacagcagaactccatcatcaaatggaagtggtatatacttcagttgggctgagcaggctatgaaggcacaagtaagttacatgaagaagtggcaggccgggcgcggtggctcacgcctgtaatcccagcattttgggaggccgaggtgggtggatcacctgaggttgggagttagagaccagcctgaccaacatggagaaaccccatctctactaaaaatacaaaattagccgggcgtggtggcgcatgcctgtaatcccagctactcgagagactgaggcaggagaatcgcttgaacccgggaggcggaggttttggtgagccgagatcgcaccattgcaccccagcctggggaacaagagtgaaactctgtctcaaaaaaaaaaaaaaagaagtggcccaaatgtccactgtcgcgcctcctgttgtcacgggatccttggggtgtcactttgcccactggaaacctctgtggctggtggtgccttctgcccgagtactgctcatgcccactgggcttgttctgcccacttggcctggcaggttgtggtcagctcacactactggcccggatcccacacctgccaagggtgagccaggtgcagagtggcaaggggtatgtgagcgagtgagtgtggggtctagccactgcacacagtcaggcatgcaggttgctgcggcagggcaggtggcagctttagatgctggctccatgcaaggctgcagctggaccagctataccacacgtgtctggacaaggggaacatggtggtgcccagaagcttggagacgccaggaaccgtagagccccaaagagggtgtcacagccctggctcatggagcccctaggtctgggctccctggagggccccacagctcttctctccttcttgtcacccacaatgtggcaagcaggggaccatgtttcaggcctctttgtgttacagccctttcagtcccaccattcagcaggtcctgagttcttgtcccgcatccaggaaaaatgaggtatgcagacaactggagggtgagcaaggtggagaggagcttcattgagtgatagaacagctctcaggagacctgtagtgggtagctcctttccacaggtgggtgggtcatcctgatgagtgtccagctctcagtggagaggagacccatggtgggtagctcctttctgcaggtaggttggcccaatggctgtccagctctcagcagaaaggagacctgtagtgggtagcccctttctgcaactggtagtcccaacacctattcacatctggctgagtccaggttttatgggctcagaagggaggaaatatgtgctgatttgtccatgggtggctatgggtgggcctggaaaaagcaccataagttctcactccagggcatggactccacccagaactggcagcctggcttcaggacatccctggcctgaaggtggggtttcatcagagacccaccccttttcacccaggagcctgtctgcctcctgccaccatcaacgtgccacccaggctatttgtaccaaggggtgcccggaggcctgtaccgagcttcccttggcgcccccaccttggtctccctcctgtgctcactggtgcccaaaagtctggagagaactgaagcaggaggggctggcacgttggtggtgccctgatcatgtgcacacccacagggttgtgacaacaccaggctcagcttcaactttgctccaaaattggagcgtgtgctgggagaggggagaggccagggagcaagagcagacacttctgagcctgaaggagcatagtggcttcctggcccactgagaggacagggatgccctggtccagagccatggctgggtggctgtagctgcacccaggagtccagggctcctgccctgccaactcagtagggggcggggctcctgcatgtttctagcccccactggcttcacagtgtgcgcagccctggactcacctttcccactgcagctagcattcccacagtggctgctccagacaggccaatgccaccatcactgctacactacatttgtctcctagattgcccctgtgacttaatggggagttgcctgtgatcagttgacagaagggaagacttaggcctggttctgcatgaacatatgcaccacccaagagtgctgcagcactacagcccctttctgtgacatccctgaaggacagtgatgaaggaaagcactctcagtggacataacttatatttttaaattttttattaagagacaaggtctccagtctctttggtctagcctgcagaagtgagatgatgaagggaacgtcattgttttgaaagcattgcaataagacacacatgttgtgccactgccatggctctaaggcctagcaccttcagaagtctacttgtgacaactatgactaccctgccaagtgcaagagaaagtgtaactggagtgcaaaggctaaaagacaaaataccaccaggactgattgcatgaagcacctgaaaattgtataccacagattcaagcatggattctgtggaggaacaccacctaaacccaagagagcagctattgcagcaactagtttatctgaagaatttcaatgatttttcactattattgtcactattattatttgtcaataaatgccatggtttaacaaaatctaaaaaagaaataaaaagagatgggatctcactttgttacatgaccaacaggttcatatgcctcctgcacagtaatagaccaattacagtgagacagcagggatgcagaagagaaaacatttaattatcatgggcagccagatgcggagctgggaggagattctcaacttcatgtcctctaggagttctgagctggggtttttaaggggattgtggaggatgagaggctggagaattgggatcgttgattgggcagcacaagagagataaaataatcaggacgtggaaactgcattctttggtgagtcagctcctcatggggtccttcagaccagctggtgtcggtggggtcctttagaccagctagtgtcagtgggtcccttcagatcagctggcattatggggttcttcagattagttgagtcagtggggtccttcagatcagctggtatcaattgggtctttcagaccagctgagtcagaccagctggggtccttcagatcagctggtgtcagtggggtcctttagatcagctgctgtcagttgggtccttcagaccagctcagttactggggtctattagaccagtcaagtcagtggggttcttcagatcagctggtgtctgtggggtccttcagatcagctggagtcagtggagtccttcagatcagctggagtcagaggagtccttcagatcagctgagtcagtgggatctttcagactagctgagtcagtgggatcgttccaatcaactggtgtcagtggggttcttcagatcagctgaagtcagtggcgtccttcagatcagctggtatcaattgggtccttcagatcagctaagtcagtggggttcttcagatcagctaagtcagtggggttcttcagatcagctgagtcagtgggtcccttcagactagcttagtcggtgggatctttcagatcagttggtgtcagtggggtccttcagatcagctggtgtcagtgggatccttcagatcagctagtatcagtagggtccttcagatccactggagtcagtgggtcctttagaccagttgaatgaatggcattcttcagaccagttgagttagtgggacccttcagaccaagttagtcagtggaatctttcagatcagctggtggccatggggttctcagctgaatagtttcctcagaatgcaggacctgaaggaccatctcaaagggaattttttttatttttttaatttttttaattttagagacaaggtctcactatattgttcaggctggtctcaaagtccagggctcaagcaatccttccacctcagcctcccaaagtgctaggatgacaggcacaaaccgcctcacctagctcaaagggaaatcttaatgtttcataatatttaggtgttatctataggatagtttaggggaataatttaaggtctacatgattttaggacaataggcaccaaacaaccatgaagaagcagatcagggagcaggctgacctattgatcaatgctgagtgtgctgcaagctgggttaattttcatttatcccctatcttcttccttggttacttttataaaatttatagggtcagtgtcagctatgttcgtagggtggtcttgagctcctgggctcaagcaatcctctgcctcaccgttctgagttgctgggattacaggcttgcaccatgcacgtggcccagtgggcagaagtttaagcagtttaagtccgttcacttttcttgaaaagatagacaccagatgtgcaagtatattctgattcatgttctgtggtcaatggtttggatggatgatcagggacttggaaggaacatgattggataattggtgacaaggaaatttggggaagaggtatatggatagacatcttgaatgggaaaataaagatatttgtgtcccatgtgaatgcttactagagggtaatctcagaagttatctattaaaataataaattgattggataacccattctgtagataccagttagccttattctctaggaacccctgccgttgcccagtgggctcatgaataaagtggccatggtggccaggatggacattatgcatgggcttagtaacatggacttccactcaccaaggctgacctggctacagccactgctgaatgccctatctgccagcagcagagaccaacacagagtccctgatatggcctcatttcccagcatgatcagccagctacctgatggcagattgattacattagactattttcatcttggaagaagcagtattttgttctcattggaacagaaatttactctggataacaattttccatccttacatacacagcttctgccaaaattaccatttgtggacttatagaatgctttatccattgtcatgatattccactcagcattgcttctgatttaggaactcacttctcagcaaaagaagtgtagcagtgagcccatcctcatggaattcactggtcttaccatgtttcatgaaccaatgggcttgataagatgataggattatttgaagatgcagttacagcaccagctagatggcaatatattgcagggctgcagcaatatgttctccagggggctaaatgtgctctgaatcagcatccatcatatggtgctgtttctcccatagccaagattcactggttcaggaatcaaggggtggaaaagggagcagcaccactcactattatctctagtgacccactagcaggatttttgcttcctgtttctgaaaccttatgctatgccagtctactggtcttagttccaatgggaataattctcccaccaagagacagcaatgattcaattgaactggatcttaagactgccacccagtcacttcaccctccttatacctctgaatcaacaggcaaagaagggaattactgggctggttggtgattgatcctgtctaccaaggggaaattggactgcctcttcacaatgaaggtaaggaggaacatgcctggaatacaggagacccctgagagcatctcttagtattgtcatgcctgtgattaatgtcaatggaaaactacaacagcccaatccaggcaggactactaatggcccagtccctgcaggaatgaaggtttggttcactctaccagataaagaaccacaaccagctgagtgaggtgcttgctgaaggcaaaggacatacagaatgggtagtggaaaaaggcagttataaatatcagctatgaccacatgatcacttacagaaatgaagactgtaattatcataagtacttctcgtttttttaaaatttatttttaatttttaaattaattgttattaatagaaatggtgtatcaccattttgcccaggctggtctcggatgtactctccttgttttgtaatgaatatatataaaatatccttgttttctttcctctcttacttcctgttttgtaacataaaatgtattgactctatatcatagtatttaactattttaaattttacatcatagtgtttaagttatgagatatcaaggagaagaacaaacattatttaaggacttcgccttctcttctggggaagaggtagtgccttttcagttgtatgtagaatgattgtatcacgttgggtggaattatgaccttgtcattgtttttatttggagaataagaatggtttcagaagatacatttgggtgtcaagttgacaaggggtggacttgtgacagttaattttatgtgccaatttgactgggccatggaatgccaaaatatttggttaaacattattctggatatacctgtgaaggtgtttttggatgagattaacatttgaattggtaaactaagtaatgccgattgtcctccccagggtgagtggggctcatccaatccatggaagggctgactagagtaaaaggccaagtaagggaaaatttacactctgtctttgagctaagatattattcttctggttttggacccatagagtcagaataaaacttataccattggatctcctggttctaaggctttcagactcagactagagtccgacatatacgagagggtcttaaaaagtgtatgaaaaatgcatattatgaaaaaaactatgcatggattaaaaaaattttggccccaaaataaattcttactaactttattataacatgtctgaacaggatctagtttgaggcactaggaagggtaagaaatcagtttgaaaagagccccttgctctgtggctgggtagtgctggaggttagcttcctctaggccactgagctctcacgtcactgcagaaggccttatctgcagagacttcccatgccaagcaggcctgccccgtcagagagaatggcagaaagctcgtgtgtgtcctggggagatggtcagagggagccaccttccagctgaaccccaataagtactcgtagctcacggtgtaaacgccctccagaggttgcagctgtatacccaaaggtcccggccagcccctgtgcgcccctgtgttgactgggtttggggaggacacagatgggggcgtaggaggtgtgtagccctgactcagcttcctggttgcatcctagtctagtgttgtttgaagtcacgtggacgtggcctccccttagaggctggtgagggcatttgagggcagttgtgtgctcctggcctggggctgtgcttttgtggctgtgtgtgtgtgtgttggcgggggagggagggaggtgccctagttgtgcacggtactctgcagcccagcgccctgccgaggcttctgctgagaggagacagcgtgctggcagtcctcagagccctcgcttgctcttggcacctcctctgcctgggctcccactttggcggcatttgaggagcccttcagcccaccactgcactgtgggagcccctttctgggctggccaaggctggagcccactccctcagcttgcagggaggtgtggagggagaggcgcgagccggaacccggactgcgtgcggcgcttgcgggccagctggagttccaggtgggcgtgggcttggcgggccggcacttggagcagccggccagccctgccggccccgcgcaatgacttagcacccgggccagtggctgcggagggtgtactgggtcccccagcagtgccagcccaccggcgctgcacttgatttctcaccgagccttagctgccttcccgcggggcagggctcgggacctgcagcctgccatgcctgagcctcccaccccctccatgggctcctgtgctgcccgagcctccccgacgagcgccgccccctgctccacggcgcccagtcccatcgaccacccaagggctgaggagtgcaagcgcactgcacgggactggcaggcagcttcacctgcagccccggtgcgggatctactaggtgaagccagctgggctcctgagtctggtggggacgtggagagcctttatgtctagctcagggattgtaaatacaccaatcagcaccctgtgtttagctcaaggtttgtgagtgcaccaatcgacactgtgtatctagctgctctggtggggccttggagaacctttatgtctagctcggggattgtaaatacaccaatcggcactgtgtatctagctcaaggtttgtaaacacaccaatcagcaccctgtgtttagctcaaggtttgtgaatgcaccaatcgacactctctatctagctgctctggtggggccttggagaacctgtgtgtcgaaactctgcatctaactaatctgatggggacgtggagaaccttcatatctagctcagggattgtaaacgcaccaatcagcgccctgacaaaacaggccactcggctctaccaatcagcaggatgtgggtggggccagataagagaataaaagcaggctgcccaaaccagtatggacaacccgctcgggttcctttccgcgctgtgaaagctttgttctttagctcttcgcaataaattttgttactgtttgggtccacgctgtttttatgagctgtaacactcaccgcaaagatccgtagcttcagtcctgagcccagccagaccacgagcccatagggaaaaacgagtaattacagacgggctgtcttaagagctgtgacactcaccgcgaaggtctgcagcttcactcctgagccagcgagaccacgaacccaccaagaggaaaaaactccgaacacatctgaacatctgaagggacagactccagacgcaccaccttaaaagctgtaacactcaccgcgacggtctgcggcttcattcttgaagttagtgagaccaaaaattcaccaattccggaaacactgcgaggcagcagcgtgtcttacacagacggaaccgccgttcccctgccatgttcaggcgggtcggcaggctttgttcgttattctgagtggcagtcgggaagggcagctgaaccccgcccggggatctagagttgctggtcaggaactggagagaggcctggcgggcctggttgtgtttgtatttgggctttctctggggccgtggagtgataggaaaggttggcgtttcccttggagatgcaccttttctagtgattgtgtttgcagggtgagtctgacccgctgagccacaatgagcaaggacaaggaatatttttcaattaacttcttaattctcgtgagtgtggcttatgatctcctttgtggtttgttgattataaggcgcaccctgacgttagaaataataaaatgagtgtgccttagcatcagagtgtcaccatctgacgctctaggactgggcagagcccaggtcctcttctctggagtactcggctaccaccttgccgtgcagggggctccctccctcccttcactgcacactctcggttacttctttctcaattccatccgcacagcttcctgcctcaaccttttctgccttctgcaggagcagatgttcccacaaggaacacgggaggtgccaaggttgggtttccagcataaggctgagccttctgccctcggtttgaccctgggtggcactgttagctggaggccacgagagctgccttggacgtgtggggccagcgagcagcggcccctcactcgtggagcattgttgcagccgggcaagtctgccattgctcatcctcttagtcttgctcccagctgcgacttgttcttacatgttctagatgcaaggcttttgtgtgtgtgtggtttgtaaatattttgtcccagtccatcgcttatcttttacatcctcttaaggggggttttgcagagaaaaggtttttttcttttcaaatttggtgaagtctgatttatcaattttcctttttaaggatctgattttggtgtcatggttaagaattcctcaatgactcccaggtcccaaagatttttcctaccttttctttgctctttctttctttcctttctttttctttctttttttttttagatggagtcttgctcttgttgcccaggctggagtgcaatggcgtgatcttgactccctgcaatctctgcctccctggttcaagcaattctgcctcaggctccggagtagctgagattacaggtgtgcaccaccacacccggcccaggctgcagtgcagtggcacgatctcggctcactgcaagccctgcctcccaggttcacgccattctcctgcctcagcctcctgagtagctgggactacaggcgcccgccaccacacccggctaatttttttgtatttttagtagagacagggtttcaccgtgttagccaggatggtcttgatctcctgacctcgtgatctgcctgcctcggcctcccaaagtgctgggattacaggcgttgagccaccgcacctggcttctctgtttggttttctataacattattcttttttttttatagagacagtgtctcattatgttgctcaggttggtcttgaattcctggtctcaagccatcctcctgcctcagcctcccaaagtgctgggattacaggcgtgacccactgcacctggccagcattcttttttttttttttaaactgttgaacactctgtaattattaggtaaaattaatagtacttcacaattatatatatcactttacagtttacaaagttactaagtagacatttgttttgatgccccaaaataaaatttaacttctttgtcctcccttctcccctccatcaaggaaagactaaggaacatttaatcagaaaaggcaatataagtgcatcaatctgtacagaactgcaaagaataaaggggaggagggtaggaccctgaagagggccacagggacttcaggaaggagaaaaccagagtgttaaacgtgaggaaagcccaggggtgacagggagttaaccaccataaggggcaggttgtattcactacataaaaggaggggcacacggcatatgtttcacattctaaaataatatgacaatatcataactgaagagctgaagttgaattttgtggtttctcagaacacaagtagaagatgaccaccaaccatggtttctgaataaactgagttcaaagtgcatctggttgcagcagggggcttccttggactctgatactagaaatttaacaaaggtaattcgaggagctgcgattttacatagtggtggcatcctagggggcatctatcgcatcagttaagtttaatatctggcaatcatggaaaaggagtttctgagcaggtaatacttgggccatctcttggagattcctgctgtaaggactaagtttctccagagaaagcacttgcctgggtatgactcagggccgggcaaaaattcacactatgaatctggtggaagggggagaagtatgcctggtgggaccacattcccataattctctaacctcacatctctgtagagttccctctgaacaaggtccaggtatctccattcctcttgagtaaggtgcacagccacatcctcagatgtcacaaactgctgatacctggctgtcaggagcgcagctgcctgatctcctgggctgtcctcatggggaaaggcaggcacctggggaacaggtggaaccctagtgagtccctgttccatgtcggtgtcctgcacaaaatgaggctttggagtcagactctcagactgggtctccaaaaactgaaatcggacccttggtgagcctgctgcttcctgggctggtattttctccatccctgttctggaggacaatgaccgtcgcagcttgcatcaggacatggccactgggtcctgatggcgaggcccgccctcggtctgtggggtgaactggggctgaagagaaataggcctttgcacccaagcatctgcacactcttggggaaggaaaccactgtcccatattctttacattatccttgtcatttaggatctccaggattggcttcagtgttaatgattctttgtcattattttcctgtaagagtgcccttttatctaaagatttcagttcatttatttgacagaaatcttcaaccatatatataaaaatatataaatatatatatatacttttttttggtgacagagtctcattctgtcacccaggctggagtgcagtggcgtgatctcagctcactgcaacctccgcctcccaagttcaagcgattctcctgtctcagcctctggagtagctgggattacaggtgtgcaccaccacacctggctaatttttgtatttttagtagagatggggtttcaccatgttggccaggctgatcttgaactcctgacctcaggtaatctgcctgctttggcctcccaaagagctgggattacaggcgtgagccaccatgcccatactcaaccatatctttgaatactttcccattccagttgttatattcttttctcaaaacaccaatcatgtatctccttgatccattttcatcagcgtctctgcgattttatccctttgcacttttccattttgttttgggtgatttttttcaagactggcctccatgtactatctatgttttcatagtatgtatttgacttcttgctgtttctataatgaacttttcatttttgtggtggctttcctgttatttccaatttctcagttaagttctaccacatcacttttttctctctaaaaatatgcatctgttattctcccttgtatcttttttttgaaaaagtccatgctttaacttttgtgagtatagaaaaaatatgtctgacatctttcttctgcttgctggaataactttctaaaaatagactttatttttatagggcagttttagatttacagaaaaattgagcgtatagtacagagaattcccatacagctcctacacggtttccccattattaatgtctacattagggtggaacatttgttacaatcatggaagtgatgttgatacattactattaactaatgtccataatttattcagattcccttagtttttacctaatgtcgttttcctgttccagggcctcctccagaataccacattacgtttagttttcatgtctcctaggctcctcctggctgttacactttctcagaccttccttgattatgatgacctcgaagttttgaggagtactgggaaagagtattataggatgccccctactggaatttgtcagatgtttttctcatgattatacagggattatggcttttggggaggaagatctcagaggtaagtgccattctcgtctcattgtattaccattatttatttattttttaatttttattttttgaaatggagtctcaccctgtcgcccaggctggagtgcaatggtgcgatcttggctcactgcaacccctgtctcctgggttcaaacgattctcctgcctcaggctcctgagcagctgggattacaggtgtctgccactacacccagctaattttttttgtattgtttttagtagagacagggtttcaccaggttggccaggctggtctccaactcctgacctcgtgatccaccctcctaggcctcccaaagtgttgggattacaggtgtgagccaccgcagctggccatattagcatgatttatgactgttgatgctgactttgatcacctgcccaaggtagtgtttatcagatttcccccctgtaaatttgctccctgtcccttccatactgcagtcttaggaaggaagtcactataagcagcccatgcttaaggagtggggagttctgctccccgtcctttacgatgggacagctacataatttatttggaattctacagagaatgctggggtaactttttctgaagtggtttttgatcatctgtcttttgtttgctattatttttcccttttcattggggagtggtttttgttcatatgtattaattcagatttgtttgcttattttgcaacttagctctcaaataatttgagggaagggataggggatttttttttttagagggaattggcagttctgactccctcatgttgtatctaaccaagaaccaagttgacatttcctctgctcgattacttctctctccctcttttttgcatccctcttcctccacgccacttttggaaaagcacctcagctccctgtggctgtcagggcttacaggtagatttcattcagatatttcatgtttaattacttgtatttcactgactcaacagcgataaaattggttgtgtgggcccaccctcctccctttgcctccctccaggcaattctctccactctggaatggggaaaataaaggaggcatccacactggtctgtcatcagccctgcctccctgctgctgtgcacactggggtcttgttgaggggtgttctctgcttcttccatgaccctcccaagcccctagttttcaaggattcttaattcttttaagaattgtaagggatctgctccaggtgaccttccttgttttggttccaattttcattacacttggcagatatttcttatggtcaattatctgggctgtagccattttctattttcattgcagataagagcttcttttctactactcattttactgttaattttggtatattcaggaaaggaatgagtaaacatgcctttactgtaccatcttttatgggaactgctcatccttaatctctgtcttcttcagctttgctggtgtgacttgctcttgatttttctcctactgctgtgctgtttctcaggctccttttccggctcctgcacctgcctgtaaattctgctattccccaggactctctcactggcccctctccccacccaccccacccctattctataacgagctcctactctactttggggcctacagaggccaggcagataatgtgattaagtgaagggaaatatcatttattttttcttctcactattgaccttggcagagtcatttattttttcatatggtgtcttcaatagaagcttttttcataacaatcttgtaggaatattctttatttccataaagatataggttctctccaactttttttttttttttttgagacggagtctcgctctgtcacccaggctggagtgcagtggcacgatcttggctcactgtaacattcgcctcctgggttcaagcgattctcctgcctcagcctcctgagtagctgggattacaggtgcctgccaccacgcctggctaatttttgtatttttagtagagatgggatttcactatgttggccaggctggtctcaaacccctgaccttaggtgatccacctgcctcggcctcccaaagtgctgggattacaagcatgaaccaccgcgcccggctatgttaggctattcttgcgttgctctaaaataatgcctgagactggataatttataaagaaaagaggtttaattggcttatggctctacaggctgtacaggcatggtgctggtatttgcctagcttctggggaggccttagggagcttttactcgtggcagaaggtgaaggaggagcaggcatgtcacatgaccagagcagaagcaagagagttagagtgggaagtggcacacacttttaaaacaccagatcttgagagaactcaatcagcaccaaagggatcgtgctaagacattgatgagggattcgctgtcatgatccaaacacctcccaccaggccccacttccaatattggagattacaattcaacatgagatttggtggggacatatattcaaactacatcaggggtctactagagaggggagggaggcagacaagggttgaaaaactaccttttgggaactatggtcattacctcggtgatgggatcaattatccccaaacctcagcatcattcagtatacctatgtaacaaacctgcacgtttacccccgaatctaaaataaaaattgaaattattaaaaaaaagataattgtaagtcgcttcaaaaaaatcctgtgtaggccaatatgacataaggcgaaccaaatagatttgctggccaggtttggccataggccacaaatttagagcctctggtttgacgtgttttatctcagtggccttcctttctgacggcttcacttgtgtggtgggaggctgagggtggcgacttgggattcatgtatttctgctctcccttgtgaaggggtgaggtgggattatgagtaatttatttgcatgaggcgcctcttgggaaataactcacccaaagagaagaaggcacgtggcaggatacgctcaactcggtaacaaaaatctcagggtcagagttgacgtgtggctctcctgcattgtactgtaactctgggagggccaggactgtgtccattttgtttacaccgtatagggtaagcatagagcctggcccaactgtagatactcaatgagtattggctgactgattgaattcatattactgccctgtgcatgtcccctaatttgatgttcacctcaaccctgatgaattcatgtctggatcccacaggccatatgtaaaaaatgcaggaatcgtgtcactgaaaactcagaaaggcattgggaatgctttcacactgccttggtgctccctaaaaagagtaaccaaaaaataaaaggaagtgttttcctcctctccattcctttcctcactctacactgctgtgcagctttagtccttgtgggcttctgtgtaatggcgggggcctcccaccaggagatgacactgctggggtgttctggtcctcactgtatagtgtggaaggtgctgggtgctaacagacagatgtgtttatgaacacggggctggagagcctaagtgggtggaagaagagagccagagaaacgttaataggaccccaggtccacccacaggatggaaaaatatgcattatacttggagtttgtggaagaggccactagctgctcaccaaatcctaattttctcatgtttctgggtacacatcctgtggttaggtgtggcctgtggttgggttccagccaagagaatatgagtagaagttatgtgtgccacatgtaggcctggcccatacaaacctcctactgtgtgactgtccatgttcttttctctccttgaccctgggaggaatgtgctgaggatggcagggcctttgctgtcctcctgggtctgtgaggggtgagccccactgaccattcggaaccattttggacattgtgtgtggggggaacaatacacttccatggcaggcacaatggctcatgcctgtaatcccagcacttggggaagtgggagcagggacatcgctggagcccaggagttggacaccagcctgggcaacatagcgagaccctgtctgtattaaggaaaaacaaacaaacacttccattatatttgagccaaaatagtttttaggtgtatttgttattgaagtgagcctgcctgactagtccagggactcagcacctgctactaggtacatctgcaacatgggcgttcaggagtggaagtggaggctcagaggccactgaagattttgagaatactcgtcagctatgacaaggcacaaggtgaagcgatgccctgagccagcgtggggtgcttggaaggattttcaaaagggaaggaaatatgaatgcagcttgtagagctttctaggaatagcagcaggaaatgcagcttcctgtaaagtgatctttaagccctctaatttggacacagaattcaaaaaatactgaagttcttcctagagaaagagttgcaaagtgtgtgacaaggaagcagtccaatctatttctgaataatgaaactgccctacaatttagtgcttaaaacaacaacgttcattttgaagaattatctctcatggttctgggtgctcacaaggctcagagaggtggttctcagagcgtcttctgtagctgcagtcaaaaggggctggagtcatcttgaaaaggtcttcactcagatgtttggtactgaattcatgctaattgacagctgcaacctcagtgggggctcaaccagaaccccaggacatggtctgggcttccccacagcatggcatctgggttctaagggtgagtgtcccaagaggactggacagatgcaggattgcccccaccttccctccccttccctcccctccccttcctttccttttcttccttccttcctttctttttcagagtctcgttctgtcacccaggctggagtgcagtggtgtgatcttggttcactgcaagctccacctcctgggttcacgccattctcctgcctcagcctccggagtagctgggactacaggcgcccaccaccacacccggctaattttttatatttttagtagagacagggtttcactgtgttagccaggatggtttctatctccggacctcgtgatctgcccgcctcagcctcccaaagtgctgggatttcaggcacccaccaccatgtgagttaattttttgtatttttagtagagacagggtttcgccatgttggccaggctggtcttgaactcctgccctcaggtgatccacctgcctcagcctcccaaagtgctgggattacaggcgtgaaccaccgcacctggccaggattaccttttcttttttccctcccctctcctcccctctcctctcctcacctattaagctaggaagtctaaggattgccttttctaatctaactttgaaagtcaaacagactccactgtgttctctattggttgtagcaatcacaaattcccaagccacattcaagggaagaggtgacatagaccccacctctcaatgggaggagggtcaaataattttgggacatgtttattttttattttattttttttgaggcagagtcttgctctgtcgcccaggctggagtgcagtggcgcgatctctgttcgctgcaggctccgcctcccgggttcacaacattctcctgcctcagcctcccgagtagctgggactacaggcgccagccaccatgcccggctaattttttgtatttttcttttagtagagacggggtttcaccatgttagccaggatggtatcgatctcctgacctcgtgatccgcccgccttggcctcccaaagtgctgggattacaggcgtgagcccccgcgcccggctgggacatgtttattttttaaaaagcttttagtttaggttcaagggtacatgtgcaggtttgttatgtaggtaaacttatgtcacgggggtttgttgtacagattatttcatcaccaaggtactaagcctagtacccaatagttattttttctactgctctccctcctcccacctccaccctcaagtgggccccattgtctgttgttctcctcttggagtccatgtgttctcttcatttagctcccacttatatgtggtatttggttttctgttcctgtgttagtttgctaaggataatggtctctaactctatccatgttcctgcaaaggacatgatctcattcttttttatggctacatcaatttaggttgattccatgtctttgctattgtgaatagtgctgcagtgaacatatgtgtgcatgtctctttatggtagaactatttatattcctctgggcatatacccagtaatgagattgctgggttgaatggtagttctcttttatttgagacagagtttccctttgttgcccaggctggagtgcagtggtgcgatctcggcttactgcaacctctgcctcccaggttctaagagattctcctgcctcagcctctggcgtagctgggattactggcgcacatccccacgcctggctaattttgtatttttagtagagatggggttttgccacgttggccaggctggtctccaactcctgacttcaggtgatccacccgccttggccccctaaagtgctaggattacaggcgtgagccaccgtgcctggctggtagttcttgttttagctctttgaagaactgccacactgctttccacaatagttgaactaatttacactcccaccaacagtgtataagccttctcttttttctgcgaacttgccagcatctgttatttttttgacttttttttttgagacagagtgccactctttcacccaggctgaagtgcagtggcatgacctctgcccactgcaacctccgtgtcctgggttcaagcgactctcttgcctcagcctcccaagtagctgggattacaggccttgccatcgcacctggctttttttttttttttttttaagtagagatggggtttcaccatgtgggccaggctggtcttaaactcctgacctcaagtgatccatctatgttgacttcccaaagtgctaggattacagatgtgagccactgtgcctggcctactttttaataatagccattctgactggtgtgagatggtatctcattgtggttttgttttgcatttctctaaagatcagtgatattgagctttttttaaagttctttggctgtgtgtgtcttcttttgaaaagtttctgttcatgtccctttgcccactttttaatggagttgtgtttattgcttgtaaatttaagttccttatagatgttggatattagaactttgtcagatgcatggtttgcaaaatttttgtcccattctttagattatgtgtttaccctattgatgttgtcttttgctgtatagaagctcttaagtttaattagatcccatttgtcaatttttgcttttgttgtgattgcctttggcatctttgtcatgaaatttttcccagttcatgtgtccagaatggtattgcctaggttgtcttccagggtttgtacagttttgggttttacatttaagtctttaatccatcttgagttgattttcgtaaatggtgtgaggaaggggtccagttttaatcttcttcatatggctagctagttatcccagcaccatttattgaatagggagttattttgccattcttgattttgtcagctttgtccaagatcagatggttgtaggtttgcatccttatttctgggctctccttatattctgttccattggtctatgtgactgtttttgtagcagtaccatgctgctttggttactgtagccctgtagtatagtttgaagttgggtaacatggtgcctccagctttgttctttttgcttaggattgccttggctatttgggcttgtttttgggtccatatgaattttaaaatagttttttctaactctgtgaagaatgtcattggtagtttggcaggaatagcattgaatctgtaaattggtttgggcagtattggccattttaatgatattgattctttctatccacaagaatggaatgattttcaatttgtctgtgtcatctctgattttttagagcagtattttataatactcattgaagagatctttcaccttcctggttagctgtatatattcctaggtattatgttctttttgtggcaattatgaatgggattgcattcctgatttggttctcagctaggttgttgtttttgtataggaatgctggtgatttttatatgttgattgtgtatcctgaaactttgctgaagttatttataagcttaaggggttttgggccaagactatggggttttctagatatagaatcatatcatctgcaaacagggatagtttgacttcctctcttcctatttggttggcctttctttctttctcttccctgattgctctggccagtacttccaatactatgttgaataggaatggtgatagagggcatccttgtcttgtgctggtttttaaggggaatgcttccaacttttgcccattcagtatgctgttgattgtaggtttgtcataggtgactaattattttgaggtatgttccttcaatacctagtttattgagagatttttttttaacatgaagtgatgttgaattttatcaaaagccttttctacatcttttgagataatcgtgtggtttttgtctttagttctatttatgtgatgaatcacatttattgatttgtgtatgttgaaccaaccttgcatcccagggataaagcccacttaatcatggtggataagctttttgatgtgctgctggattcagtttgcaagtattttgttgaggattttgcattgatattcatcaaggatattggcctgaagttttcctttttttcttgtgtctctgtcaggttttggtatcaggatgatgctgattgcatagaatgagttggggaggagtccctcctcctcagttttttgggttagtttcagtaggaatggtactagcttgtcttcatacatctggtataaactggcaataaatccatctggacctgagcttttttgtagttggtaggctatttattactgattcaattttggagctcattattggcctgttcaggcagtttgttcctggtttagtcttgggagggtgtatgtgtccaggaatttattaatctcttctaggttttctagtttgtgtgtatagagatattggtagtagttttttgctggttgtttgtatttctgcggtgtcaatggtaacatcccctttgttatttctaattgtgtttatttgaatcttctctcttttcttctttattagtagcctatctatcttattaactttaaaaaaaaaaccctcctggatgcgttgatctttgaatggttttttgtatctcaatctccttcagttaagctcgattttggttatttcttgtcctctgctagctttggggttggtttgctcttttctagttcttttggttgtgatgctaggttgttaatttgagatctttctaacattttgttgtgggcatttagtgttgtaagtttccctcttaacactgccttacctgtgtcccagagatgctggtatgtggtatctttgttctcatttgttttaaagaacttcttaacatctcccttaattttattatttatttacccaaaagtcattcaggagcaggttgtttgattccatggttttgagtgattttttaaagtcttggtttctatttttattgcattgtggtctgacagtgtgtttgttatgatttcagttttttgccatttgctgagaattgttttgtgtctgattgtgtggtcaattttagagtatgtgctatgtggcaatgagaagaatgcatagtctgttgttttcgggtggagagttctgtagatctctatcatatccatgtggtccaatgctgagttcaggtcctgaatatctttgttaatttcttgccttgatgatctgtctaatactgtcagtggagtgttgaagcctccaactattattgtgtgggagtctaagtctctttgtaggtctctaagaactcgctttatgaatctgagtgctcctgtgttgggtgcatttatatttaggatagttatatcttctggttgaatttaacactttaccattatgtaatgccccggtcttttttgattgttgttggtttaaagtatattttgtctgaaattagaattacaatccctgatttttttctgatttccatttgcttgatagatttttctgcatccctttatttcaagcctataggtgtcattgtgtgtgagatggatctcttgaagacagcatgagatcttgcttttttatccagcttgtcactttgtgccttttaaatgggggtatttagcccatttacatttaaggttattattgatatgtgtggatttgatcctgtgttgttagctggttattatgctggtttatttgtgtggttgctttatagtgtcactagtctgtatacttaagtgtctttttgtattggctggtaatggcctttcctttgcatatttagtgctcccttcaggacctcttgtaaggcaggtctgatggtaacaaactctcagcatttgctgatctgaaaaggatcttatttatcctttgcttaggaagcttagtttggctggatatgaaattcttggttgaagattttttttctttaagaatgttgaggccgggcgcagtggcttgtgcctgtaatcccagcactttgggaggccgaggcgggcagatcacgaggtcaggagatcaagaccatcctggctaacatggtgaaaccccgtctctactaaaaatacaaaaaattagccgggcgtagtggtgggcgcctgtagtcccagctactcgggaggctgaggcaggagaatggcatgaacccgggaggcggagcttgcagtgagccgagatcgcgccactgcactccaacctgggcgacagagccagactccgtctcaaaaaaaaaaaaaaaaaaaaaaaaaaagaatgttgaatacacgcctccaatctcttctggcttgtagggtttctgctgaaatctattagcttgatggggctccctctgtaggtgacctgccctttctctctagctgcctttaacattctttcattttgaccttggaaaatctgatgattatatgtcttggggatgatctcgttgtgtagaatattgcaggggttctctgtatttcctgaatttgactgttgacctctctagggaggtcggggaaattttcatggacaatatcctgaaatatgttttccaagttgttcactttctccccatccctttcggggatgccagtgatttgtagatttggcctctttacataatcccatatttctcaggagttttgtcattccttttccttcttttttctttatttttgtctggctatcttatttcagagtgccaatttttaagttctgcgattttttcctcagcttggtctcttctgctgttaatacttgttattgcattgtgaaattcttttattttttattttattttgtttttgagacaaaatctcactctgttgtccagactggagtacagtggcatgatcttggctcactgcagcctctacctcccaggttcaaatgattggcatgtctcagccacttgagtagctgggattacaggcgtatgccaccatgcccagctaatttttgcagttttagtagaaaaagcgtttcactatttggccaggctggtcttgaactcctggcctcaagtggtccacctgcatcagcctcccaaagtgctgggattacaggcatgagccactgtgcccggctgcattgtaaaattcttgtagtgtgtttttcagctctatcagatcagttaggttctcttttttactggttatttcatctgtcaggtcctgcatcattttattgtgattcttagtttccttggattgggttttgccattctcctgaatctcaatgatcttcattcctatccatattccgaattctatttctgtcatttcagccaactcagcctcattaagaacccttgttggagaactagtgaggttgtttggtggacataggacagtctggccattggagttgctggagttcctgcattggttctttcttttctctgtgcgtgggtgctcctttaactgttgggctgcctctgattaaaggggccaggtaagggcgtggtggttgtgctggaatcccaggccagacagcccttcccaatgagcagaaggtacatgcattggcattcatcaagaaaacaactcgacccacagagaacagagaaaacaagacaggatgaccacccacccgggagtgacacctagtaacaacctcagttcaaaagtctgctgagggtgctgccttcagctgaaatgaacatgagggtgtggggaaagccctccttaggaagaaggctttttaggtcttagtgagtccaaaaaagaggagtggcagaagtcataaaagaggcacacgatggaaatgtctgtcctttttaatatcatggaggctgctagagttctaactagggagagctcaccaactaacaaggcactgaagagcccacagcttggggctcatggggacaaggtcaggagatggtgggaggggatgcaaatttagaagttccacctacgaggatcccgatatggcaagtacaaaatgcccaattaacctttttctacatgttttcttccaatggtgtttaagttcacaggacatagacttttttttttgacagggtctcactctattgcccaggctggagtgcagtggtgtgatcacagctcattgcagccttgacctccagggctcaagtgatcctcccacctcagcctcctgagtagctgggactacagacatgctctagcatgcctggcattctttcttttttttgtggagatagggtctcaccatgttgcccaggctgatctcaaactcctgaactcaagcaaccctcctgctttggcctcctaaagtattggtattacaggtgtgagccaccacacctggcccacaggacatggattctgaacaactggcataaatcgactggcctcaaggtaaggttttaaactaagcttaagcttttctgttgccctcagataccactgaatttcttcttcagattttggtgacattaagtggtggtttctggaaatacaattttaattttgcttgggatgattgtcttggggtctggggatagctcattttctaaattttgtggttgtggggctggtgttgcaatattcttgtgtctcattaactttctggaattttaaaaacagactcatggaaggtttgcctcagaactcagtctttgaagccttggaggaactaacctgttccagcccaggccgcagcttcggaagggaccacagctctgcccagggattggaaacccactagctgggattaaacagaacacaaattggaactgatagttttgtgactttaacatagacactttgggcttcaattacttttgactttaatgtcatagtttcagtttgcaatgggatttgaactttaattttggagtttgattaatgggagggttatttgttgttcaaatttgaaaatgggagggttatttgttgttcaaaacctttattgttggcaatcccttgttggagcttcttaataccatcatttaatctcattgtggatctccgatagctacttagataacatggctgcatgaaattttattttatttatttttgagacagggtctcactctgttgcccaggctggagtgcagtggtgtgatcatagctcattgcagcctcaaaatcctgggctcaagttatcctcctcccttggcctcctgagtagctgggactacaagtgcgtgccactatgcctgactaattttttgactttttgtagagatgaaatcttgctatgttccccaggctggtcttgaactcctggcatcaagtgatcctctctttttggtctaccaaagtgctgggattacagcactttggcatgagccactatgcctgaccaatgaaatttgaggtgggaaacggagcacccaggctgaagtgcaatgctgtggtcatagctcactgcaggcttgaactcctgggctcaagcaatcctcctgcctctcagcctcctgagtagctgggaccacaggatggctaatttttaaacttttttgtagagatgaggtctccctatgttgcctaggctggtcttgaactcccagcctcaagcgatcctcccgcctcagccttctgagttgctgggattacaggtgtgagccactgctcctggcaatgtatttcaatttcgtggcaaaattgcagaaatgaacataaaacacaggtgaggataggagagtctaacttttctggcaagatcgggcagtgttgagctccaaggaaaaggagaaggaaccctggacacattgataaggcgtcctcttttccttggtattaactgaagcatgctcttgatggggaggaagctgctgctactgctgccgtgtttggtgtttggagaagttaatatggtttgttatttgttaaaagcttactgagtaccaggtatatgctgaatgcttagcatacgttattttgtttaatcttggccacaatgggccctgacagtgatagctgtgtctgaagtaggtgctattattcccattttacacctgataaagctggagctcagagaggcatagtaactttttcaaggtcacacggctaaaatgaaaggtaatgaatggtttgaattcactttggcacattcaatcaaccaatcctcagatactcactgagcgtgttgtatcagccattatttttagttgcaagcagtagaaaccaactctggctgagtttagcagaagatgaatttattaaagggaccctggattgctcatggaaattccaggggagctacagagccattgtggaagcttcccagcagggacaatggtcagaacctggctgccgctgctgccacttctttgaccatggcctggatgcttcggcttgcaatgcttacccactggggctggatgctgggtgctgctgagaactctacctcctctgtgatcttgctgtggccaccactgtccctacaggctctagggtccctgcttcctggcattactggctctggattgaaagcctgggcctctgatgaatggaacgtgtgtgcatgtgaaactgcctttgcaaagatgatgacagtgagggaagtctagcatgggtgactccatcttgcctctaccctcacaggctggctgtcctcactcattcctgggcataggccaagctaaccatgggaggaatttagtttacagtttaactctgaagcaaagatgatattagtccctccctaaaatgaaccccctcctagctcagggacctgcctttgtaaaactaatgaaaggccacaagattaggattatgggaggggcttgaattttgctaagatgtgggtgtagctaaccgatgaccagccattgacccctagcttgcctttctataatcctttgctgctcaggagtcatgcggccagaggtcacaagatctgtgacttccccaattgctcctatagataacatcactattgtaaaaccaaatattggtcttctgagatatttttcagacttttgcattctgaaatgattcatgactcaactggtcctgtgacccccacccagaggtggacttagtgcacaaggtctgttttctacactcctatgattttatccccaacgaatcagtagcacccattctctgctcttaccgcccaccaaattctccttaagaaccctagcctctgagttcttgtggggactgatttgagaaataaactcccatcctttcacttggctagctctgtgttgttaaactctttctctactgcaataccatggtctcagtgaattggttttgtctacgcagcaggcaggaagaacccttcgggtgattacaaattagcctgctccagagctgctggaggtgggggtgacacacttcttgtgcctgtgtcttctttcttgggaggtcggctctgttcccaagactgatatcatggggaactcctctaatgtggcaaagcagtttgaatgctgggcagccaggggagtcacagatggttgcatacacatctgtgttctgcatgacactgctagacatggcggacaataccaagacggatcagacccagcacctgtcttccgagaccttacgggctcatgattctcttccttttaacatgcacatttattaggtaccatagtgtgcaaagcttgttcactcgaattatttcattaggtccatctgatagtcatgtagggtaggcagaactgataggatttctgttttatatttgaagaaactaggtctgtcaatagtgagccaggtttaaaaaaaaaaagaaactaggaagttaggtgatgagcctaagacatcaccactggtgaggagcagagctgggacatgagcctatcttctgactccaggcccagtgctaagccaactaaaggggcataaaggggagctgagatcagggaaggctctgtggagtggcactgcccctcagtcccttgtctgcaattctaaaatccaaaggactctgaaaacaaagtctctgtcttttttttgtaatgggatctcattctgttgcccaggctggagtgcagtggtgccctctgcagcctcgacctccctggcacaagtgatcctcttgcctcagcctcctgagtagctgggactacaggcgtgtgtcacaatacctggctattgttttttgtttgtttgttttcaagtttgggactaaaactcaatttggcagcaaaacctgacccgaactgatgtgatttgtaatctttagttatccatttaccgtaagatcaatgtgtttagctgcagaaatcttaatgtttgttaatagggggttatcctggtccataaagggagggagaggaggaggtgttacctaatattgggtccatggactacatagcctaaaaaaatctataaaatttcaaaacacacctggcttcaagggttatggataagggagtctgggttggatctgaaagggggcttggttgtggggtagaatttcgatgtttggaagggatgtggagggatgttatgaagaggaagcctcacgccataccaccttgggtcttggtgttaagtcattatcaaccattacatttgctttaaagcagagatgacttacatttctgataactactttcccttaattcatgattcacacacatttggagggctggactttctgggtttggttatttcccctggtaccaatccccgccttttcccagaaatcacttgactttcccgaaaactcagaaacacaccctttggctgaaaaatagcattaagcaatcggtgaaattccccattcctcctttccccgctggagccctggatagagggctctctggcctgggaggaggacgctgtccttgtttcaaaagcagagggagctccaagatcaaggctgagtttccctaagtcatggtctcccagccccctctgtttagatcagggaatttcagacatgcacactcgggtagggaatcttatgaacagaaccaggacagggaggctggccggaggttcctgcagagggagcgtcaaggccctgtgctgctgtccctgggggccagaggggttgcccagcatgcccactggcaggagagagggaactgacccacttgctcctaccagcttctgaaggtaaaatccttacaaacgaggagcagagctttgatggaggaaaaaggaaaggcagaaaacttcacgtaggagggcttggggcaatgatagagggctgacaaaggcagcataaaaaaaggcagaatatagacaacctatttctcttaggctcaccccatccacccctacttcacccccttacctaccactgttttcagggttaaagcaattttagcaaccctttactaggaactgtggggagatagcttgtattttcagtaagttggcggtggggggcagggacaaactccaaacaaactctggaaaacgaatgtaggaagtttttatgttccttgtcatttggctgtcccttttctccttcctcgcacaaccctgtatcagtggggcagcacttccttctcagaccgcttgtcccagggtccctgccttcccctagtgaaagaagctcctgcctccatcggtgggcgttgggagcatcagcggagatgcacgcaatgataaacagcagacagggctgcttgaggagatgaggtgatcacggttaaagaagaggggctgtcctacatggatgatcatgatgcgccaagactgttgaaaacctgagtggaaatgggagcatcgttcttgagggcaggagagagactgataccgcgggggtggggctggtggaggacaatagaggaagaagaaaactgggagaaagtactcgattcctttggagaaaaattaggagaaagtctagagaagcaatgagggaaggatacaatttagctatagtctagaaagttagtcgaagttaactagggagggtgtgaggggcacggtgccatgtggggatgttggtgatatggccctgtgtgttatacctttgaaggtgacactgagccccaggtgacgccgcaccaccaaagaaggtgcttgtgtttgtcagacaaatacagccaggcctgccaccccttaggctccaaagtccggaggtgcagaaagccaggaccaagagacaggcagctcaccagggtggacaaatcgccagagatgtggtaagtgatcaagggtccctgagatgacacagactccattcccttcatcttctcaagaaaagcgctcaagggccaggcatgatggctcacacctgtaaccccagcactttgggaggctgaggcgggaggattgcttgagcccaggactttgagaccagcctgggcaacataaggagaccctgtctctattaaaaaaaaaaaaaattagcccagcgtcatgcgtgtcacctgtggtccctgctactcaaaaggctgaggtggtagaatcacttgagcgcgggaggtcaaggctgcagtgacctgagatcgcaccactgcactccagcctgggtgacagagtgagaacctgtctcaaaaaaaaaaaaaaaagggctcttgtctgaagcctgggttttggtttgacctgggccttttctttattccgacctaagattctcccccatggccgattgactgcctctcttcttccccctttcttctgcctctggcaaatagcgcgttctgtcctaggctactggtgcctggtcacccgccaatctatgcctctgttttttcaggtgcattgtcctgttttcacttttggcatgggtttatgctgagcctaccatgtatggggagatcctgtcccctaactatcctcaggcatatcccagtgaggtagagaaatcttgggacatagaagttcctgaagggtatgggattcacctctacttcacccatctggacattgagctgtcagagaactgtgcgtatgactcagtgcaggtatgttataagcacaaaaagaatagagatggaagactagggctaaggtagcggaataaggatgtgggagggagtgccacctgtactcacagtgaactggagtcaagtcctagtggcataaatgttctattctctctgtcccttcttttaactccataccaaaatattaccctttcctagattttttttttgtgactcttctcttagataatctcaggagacactgaagaagggaggctctgtggacagaggagcagtaacaatccccactctccaattgtggaagagttccaagtcccatacaacaaactccaggtgatctttaagtcagacttttccaatgaagagcgttttacggggtttgctgcatactatgttgccacaggtaaggctcacccttctgcatgtgccttattgacccagctaaaagattagaaatgagaaatccactgagcaacacattgaatgaggattctgttcgtaattcttataaaaagtgttgacttggcctgggtcgctccataaatcacttttgtgaaattcaaatgcatgatcatatcttagtggtgatgatgatcatggtaataacacatagtacataataaacagcaatttgttgagagccactataaactgggtatgtattggggattggggatttttcctattttaacacaatcgtcactttaatccttcaaggtaggtattatttgctccatataaagatgaagaaaataaggactaggaaagttaataacttgccaagaatcacacaaggaatgtgtagtatttaaacccattcaatatatggcattcaaaccttcaaattctgggtacttctgtatctctctctaggttaaaatgaagctaggacatctcataaagccaaactattgtttagatttgacagaaggaccaacatcatataaagcaatgaatgtactgattcctccctgcagaaggcatcgtcatgatgtttaccttgcagagtgtcattcctggagctgaaatgctctgtacatgagaaaagtcaaggatctctgacattaagagctgcctaggccgggcatggtagctcacacctgtaatcccagcactttgggaggctgaggcaggtggattaccggagcccaggagttcaagaccagcctggccaacatggtgaaaccctgtctctactaaaaatatgaaaaattaaccaggcatagtggtggtgcgtgcttgtgttcccagctcctcgggaggtagaggcgtgagacttgtttgaacttgcttgaaaatgtggaggttgcagtgagccaagatcccaccactgcactccagcctcggtgacagagtgaggctatgtcacttacacacacacacccccgagcttccttatagctgtgtagtggtagggctcaactctggaatcatatgtcaggagagtaatatggaataatagtagcctgaaatgtgatcccttgacggatctttaagcaataggcctttcctactttttcttacccttatggttttggatttaacctcattctcccttcttggtgtttgttcttgacctcagcctctttctactctttgtagacataaatgaatgcacagattttgtagatgtcccttgtagccacttctgcaacaatttcattggtggttacttctgctcctgccccccggaatatttcctccatgatgacatgaagaattgcggaggtgagcttggtgttaagagggttgcatgttccctgggatttggaatggctgaggcctcagaaagggctttgtccacccttccaacttcgattaggccaagccttcatttggcacttcttttttattttagaatttatttatttatgtattatttttaataatttcaatagttttgggggtactggtgtttttggttacatggatgagttccttagtggtcaattctgagattttagtgcacttgttacttgagcggtgtacactatacccagtgtgtagttttctcgcccctgtttcaacctcctcccacgttgagtccccagagtccattatatcactctgtattggcatctattcttagttactcataagctgagatgaagccacaagaaggaggaagataagactatagggtaaagttagttaattggataagagagatagatgcctgtaaagggtctactgggggctgttcataaccagaaaggctccatcctaagcaaagtgatggaaacctaatagggattgggtattcctactgatacgtattgcacgtgtaattgctctatccctccagttagggcagggatctcaggttagtttgaatgcaggactgtcagtttctgagagaaggaatcatagaatagtgcaggaattcctttgcttgaccctgtatttgattctccctttctctttttctctgttagttaattgcagtggggatgtattcactgcactgattggggagattgcaagtcccaattatcccaaaccatatccagagaactcaaggtgtgaataccagatccggttggagaaagggttccaagtggtggtgaccttgcggagagaagattttgatgtggaagcagctgactcagcgggaaactgccttgacagtttagttgtgcgtgatggttgattaataccccacccttaacttacacagagagatctctccctgaagacaaatttttttttcatacagcatctttctctgttgctcaagctggagtgcagtggtgcaatcacagctcactgtagccttgatctcttgggctcaagcaagcgtcccacctcagcctcctgagtagctgggcccacagacgtgtgtcatcaaacccagctaatatttttattgttattctttttttttttacagagatggggttttgctatgttgctcaggatagcctgaaactcctagcctcaagcaatgctcccacctcggcctcccaaagtgctgggattataggtgtgagccactgcactcagcctgaagataaaattatcttttctcctgacccttattttcttcttattttatgtgacatttaatgcctcttttatttgtatctcccacttcccaattttacctcttccctttagttctttccctcttctgatttcatcattttgttcagtttgttgcaggagatcggcaatttggtccttactgtggtcatggattccctgggcctctaaatattgaaaccaagagtaatgctcttgatatcatcttccaaactgatctaacagggcaaaaaaagggctggaaacttcgctatcatggagatcgtgagtaacttagaagtgcctctttggttggtgataccaaagtccccaaacaatgtgggatcaaagcaggtagatgatccaggcacactggaagcacctgtgatctcagctaccgagggaggctgaggcaggaggatcccttgagcccaggaagtaggagtttgagtccactctgggcaacagagcaaaaccttgtctctaaaacaaaacaaaaacaaagcaacaataatttaaaaaacagatagattgttgttctgatagaatcctgagatacttcacttcttcaggaaaatctaaaccagtcaacggttgctagaaatgcctcaacctctagtaatcctttaactagacctgagactgcagacagcttgcgggtggttagttggtaatgccatatgattttagacatctgctgtattggaatgttaagcatcaggattgaggacaactggacgattttagaaagtgtgagaatgatgtaaatagaatgagagtcttcaactatttagtaattttttcctcctgtcccaacttctgttctttcaagcaatgccctgccctaaggaagacactcccaattctgtttgggagcctgcgaaggcaaaatatgtctttagagatgtggtgcagataacctgtctggatgggtttgaagttgtggaggtaaagtaccaccttggcttctccccagtccctggccccagatcaggatgagcggactgaaattgtccagttgtttacccaatgtatgtgtgtgatcaaggtataacacctttcccataaacacaacagcttaagatctgtagttctcccttgtgagtcatggagctgcctggccagcttggcattctctctgccttcagtcttcttgaggaaggggagttgacacgttggggcaaagctttctgtcagcctcatctcctgggtgctttaggtctgctaagatgttcccaagcttcttgtggtgaggactcctcattgatccaaggccagagatcaattccagttttgattttggtttcccatatctctcttcagaaataagtggtgatgtttattattctccagggacgtgttggtgcaacatctttctattcgacttgtcaaagcaatggaaagtggagtaattccaaactgaaatgtcaacgtatgtgtctcttcaaagtggaagtctttctttttctctcagagagaatggaaagatcagcacatcaaaattcaaatgcatggtttcctcttaggcatgtgagggagtgggttgggtttttgaagggaagccagtcatggaagcttttctagtcccagccccgcatctggtcccaggccaactagatcggcatgtttctttccaagaaaggggctatgggataggtcgagttagtagccccacgtgggtgcatttgtggcttccactgggccttcaccaaccactgagaaccaggctcttcactacggctttcatggggccatctgaattggcatctcagcgggtgagagagctgagagatgccagttggggaggatggccacagagaggctggtgtggggaggttcatcccaggtgtgcctgtggatatggggtggggaagcagtgaggatgaacctggccccatgactcttccttggaggaagtggctgtcctgaccatcgctctccttccttcgtctggtagctgtggactgtggcattcctgaatccattgagaatggtaaagttgaagacccagagagcactttgtttggttctgtcatccgctacacttgtgaggagccatattactacatggaaaatggaggaggtggtaggtttcttctactggagaagagagagagagagtgagaaggtgttggagggtggatagcataatctgtgccagagacagagtttggagacaaatgaaggcgataggacagacattgttcatccccttggcttcgtccaaagatacagttttcatctggagcagggcaagttcaggggagcatcagcctcagggaatcatagaggtcaccaactgagttcacagctgcagcaggaattcccctacaacatccatttcatgggattacccaccttttgaccagttatttcatgtaaaacccacaggagcaatgccttcagctttaagccaccaaactacactgactggctttcttgatgtagaggctttggtcatgctaggtgcagggctgaatgagaccctaatacgttctctgcattgctctgtatttatttcgccactttcccgatgccttctttccttctgctttggagatgttccctttgtctccctggcaggctagaggcctgagggattgtttggaggaagatattttttttctggctgatttaatctgatttactacttgaatcctagacgagctgaggttctgaaggaacggggcagggtgttggggtcggaggggggaatggaagaaggaagatgtggtggtgagtgtggcctgtgttctctgtgctattccaggggagtatcactgtgctggtaacgggagctgggtgaatgaggtgctgggcccggagctgccgaaatgtgttccaggtaaggagggctgaggcttggggagagatgatagccatgggtgactgggagtcaccttctgaaagcaactgtaatcctcttgggaaaggactgaacagtgacctgccagagtccagctcagtgaggtggcagtatcactgtgccgtgggctgccagggccgtggggaacctcctcagccgcactgaagccaggccaactggaaggaaatagaaacgtcagccagcgacagttggtgtctggtaatgtagctgcagtgagaagatacagaactgctaaaaacagggcctgaaagctgagagtgtgtgagtaatcaacactcagaaacaagtctagctaaatagcctagttattatattaaaagtttatagggcagcaagatatagaggaattcaaagaatgaggaagataagagttgggtagcagaaggctgaggcaaatccaataggataataaccatcctgggtggtactgaaagctgaagactgagctgatttgttgcatttattatctcattcgtgtccgtataacagccctgtgagctaggtgtcattggtcttatctgaccaatgtcaaatgtgaatgggtggggtgcaagttcacagagttagcaagtggcaaaggcaggctttgagcccaggtctgtctaagttcacagcccattgtgctcaacttggagtccctccaggctgtctagtaagggatttaagtaagcagcttcacttgaattcagttattagtataactgaatggtaatggcaccagtcactgggagtgagaggtcagggccaaagaagggacccctctctacttcctaggctgacctgtggtttactaggagggactcaggtgcaactaggactccagtaaagaaggtgattaaagtttgatctgggcatctgaagaaggcagaaatctttcctcctccaccatctgtgtgagaaaagggtttccagcactggctcttgattgggcaccggcctcatgtgccgagttgggaggtgcaaaggggacccctgcctccaggggggctgtgggtcgcactgtggatagtgtgaggcattagtgcatctggactcagtgattcacacactgcctccgtttaactgagctctcccatgagccagcttatgacatcggcaaagcgggatgtttaggtaaggccagagtgggtcaggtattgagattgttgaccaaatagggttgactattttgtactagagaatcctgcaacctagcaggtaacattatgtgagtggttggaggatttgcaggaagccagcatcatttcttcctccttccctgtgttgttttattccttcctagtctgtggagtccccagagaaccctttgaagaaaaacagaggataattggaggatccgatgcagatattaaaaacttcccctggcaagtcttctttgacaacccatgggctggtggagcgctcattaatgagtactgggtgctgacggctgctcatgttgtggagggaaacagggagccaacaatgtatgttgggtccacctcagtgcagacctcacggctggcaaaatccaagatgctcactcctgagcatgtgtttattcatccgggatggaagctgctggaagtcccagaaggacgaaccaattttgataatgacattgcactggtgcggctgaaagacccagtgaaaatgggacccaccgtctctcccatctgcctaccaggcacctcttccgactacaacctcatggatggggacctgggactgatctcaggctggggccgaacagagaagagagatcgtgctgttcgcctcaaggcggcaaggttacctgtagctcctttaagaaaatgcaaagaagtgaaagtggagaaacccacagcagatgcagaggcctatgttttcactcctaacatgatctgtgctggaggagagaagggcatggatagctgtaaaggggacagtggtggggcctttgctgtacaggatcccaatgacaagaccaaattctacgcagctggcctggtgtcctgggggccccagtgtgggacctatgggctctacacacgggtaaagaactatgttgactggataatgaagactatgcaggaaaatagcaccccccgtgaggactaatccagatacatcccaccagcctctccaagggtggtgaccaatgcattaccttctgttccttatgatattctcattatttcatcatgactgaaagaagacacgagcgaatgatttaaatagaacttgattgttgagacgccttgctagaggtagagtttgatcatagaattgtgctggtcatacatttgtggtctgactccttggggtcctttccccggagtacctattgtagataacactatgggtggggcactcctttcttgcactattccacagggataccttaattctttgtttcctctttacctgttcaaaattccatttacttgatcattctcagtatccactgtctatgtacaataaaggatgtttataagcaaa

SEQ ID NO: 4 - DNA, 13737 bp, Macaca fascicularis
  source 1..13737: mol_type = other DNA
atgtgggcagtggccatggcaggggatgagatggccataccgctgggcatcctcctctctgcccactctggacctcactgacatgttctcagcaggggtgcctgggtggggagggcggcctttgcagctgctgcattgggtcactccccagggcagtgtccagtccagaggccaccatactcccctcacactccccttccagcctcctcccctgcccggccccatccctcccctccccttccaggaataggactggcttgggaccagttaatggagggtgagggtttccacccgtgggtctctgaaagggctcccacaggttcagtaagagcgtctgggagagaccatctgtggagtgtgagacacaggcagagtgtcccctcctgggcagggggtcccctcctctcgctgcttcctgccgtgagcccagagggaaaaaaggaccatggcatgggcttctatgtataaggtctcctctggtccttaggaggagggatggggcgcgtgttgtgtgtgtccatgtgtgtgcacagtgggattgatgagagaagagtgtgtgaagagagaagggtgttcctgtctccctgaattgcctcctatgtcctggcttctcccctggcttccccctccctcctgggtgcccatcacccttactcacatttctcaaggcccgtgttgaatcctgggctctcctgacagcgtcttcgtgcactgtgtgcagagggaggccgcgtcacgcacagcagggaggggagggttttctgtggagtggaggggggaccattcccggaggaatgttggagggaatgaactatttgcataaacaaaagatctgagtttccactttaatttagttttggttttgaaatccctgtcggtggtgccacctgctggtctatgagggaaagggctaaggagacgggagtctgactttttagggccaggggagcctttggttggaggcccagatgcctcagtctctgaatctgatcagcttctccttccttccaagactttcctggggggctgctgctgtgtttacaaggttcctaccaaagcagtgggagaccacaggttgtgaattctcttttctgggctgtcctttcccatgaccccgttcttcttgccgtcattcagcccacagccctggttcaagaatggcccgggtttccatgcccaggatgtaatgataggaacactggggcagaggagggcacgtgggagtgggcagaagagagaggagcttggttgccttggggccctggcctgctttagccgtgaatgacacgtggacatagaatagggatggccatgtcagggcagccctaaatcagccctgggtttgagaccctctggggcggctgcggagggggtaaaatgtccccatctcctcagcatctgctcaacacaagtgccagggctgaagccgagggtgcgggtgtggagcaagaggcgcttggtgtttctgagatggagccaggcccctgggagggaggagggaccctagactctcttgtccatgaggccatagtgtcctgctttaaaaattttgctcttggccacgtgtggtggctcatgcctgtgatcctggcactttgtgaggccagggtgggaagatctcttgagcccaggagttcgagaccagcctgggcaacatagtgaaacctcgtctctaaaagttaaaacaaataaaaaacaatttcactgtgtttggaaggctttcttcatcaactctccatggcaccaaatatctgacggcactttaccccatagaggggcttgggctgcagagcaggcctctgtgttcttaagcctttgtaggctgttctgcttgtttcccttattagattaatccctccaacctccacccttctgcccccaaccccgttcatccatttttgggctacctgtttaatggcaaggcactttcccaggcaatagattgcaagaattcacagagctgatgcagttccccatcaggcagtgaccaagtcatcagtagttagacagcaggcacacagaaggtgcaagatccaccaacacttggagggtttctccagcaggcctgtgtgtcagagctgaggactgaacctaatggagggctggtctgtactgggatcaggatatgaaccacagccttgttaggtcaggaaagacaaaagataggggagaaggaaaaggactagatcagaggacgagaaggaagaggaatctcgtgtaacaaactgcacattaatatcctggcagcagcagtggtgtgtgtgtgtgtgtgtgtgtgtgtgtgtgtgtgtatgcactgtatgttcataatggaggcagagggaacgggtaaggaggtaagtgttagctgaagctcttccatccatcgtagggagtctcggttctgccttggcattgtgcaacatgcttggagagtggcgtgagccaccgcgcccagccatgaattttatctcaatactaatttttcaaatggttgatttttctggcatgtgtggcatctaggtagggagatattttaggaatagagagcctgtctgtatatccttaaaacatatggcacaaaaacagagtttcctcttacttcagcttgtcggtctctcttcctccttttcttttcctttttttcctttttttttttttgagatggagtcttgctcagccacccaggctgggtgcagtggcgccatcctggctactgcaacctccgtctactaggttcaatggattctcccctctcagcctcctgagtagctgagattataggcacctgccatcaagcctggctaatttttgtgttttagtagagatggggtttcaccatgttggccagggtggtcttgaactcctgacctcaggtgatctgcctgcctcagcctcccaaagtgctgggattacaggcgtgagccaccgcttccagccttttcctccttttctagtccatctcattaacttccttcatgcttttcctcagatatgtcttgacccctgaagaatgaggaacaagctccctgcctcttcttttctgggccttcttgattgccgtgttcttccccaccttctgcttcttatcttcctttctattctaaggctttcctttaacccctgtgtcccgtaggtcccagtcgcagctgaggcttgttgggggaatggtgctggcaggtggctactcaccagacatacactgaagaacctcttccccatcctgtctgtgcttccaggtccctggggttgtgcaggtgagtgcccctgaggcgcaaaataaggagaggcaaagaaataggctcagagtggtagctgttggttaacaaggaggttcctgcagagggagcgtcaaggccctgtgctgctgtccccgggggccggaggggttgcccagcatgcccactggccggagacaggggactgatccacttgctcctacctgcttctgaaggtaaaatccttacaaacgaggagcagagctttgatggaggaaataagaaaggcagaaagcttcacgtgggagggcttggggcagtgatagagggctgacaaagacaccctaaaaaaaaggcagaatatagacagcctatttctcttaggctcaccccatccacccctacttcacccccttacctaccactgttttcagggttaaagcaattttagcaagattttaggaactgtggggagatagcttggattttcagtaatcgggggaacataaacaaccccaaacgaactctggaaaacgaatgtaggatgtttttatgttccttgtcatttggctgtcccttttctccttccccagacaaccctgtctcagtggggcagcacttccttctcagaccgcttgtcccagggtccctgccgtcccctagtgaaagaagctcctgcctccacctgtgggcgttgggagcatcagcagagatgctcctcacacagggcaccagcttctggggtccgtcccgcagaccctgacccacagacagatgaataacctacccagacacacggatactcagtggaacagcagctaggggtcctggcccctcagagacaccaaggaaggtgctgtaaagagtagccaccacagccccaactagctggccctgcagacatttattagcacagttttaacagcaaagacttgagtcaacacgcctgtgggtaattaatctggtcgccctcaccctgggagagcaatcctgcccgccactgatcaaggattagttttaggactacatgagtaaataagctctttagataaagtcctgtatgctcctatgtatctatgtcctgagcttttaagagaactcagctgccttcagccaagacttttacaaaagctgggcaaacttcttggctttccaagaaggcttatgtttatttcctctaaaatctttcccaccaccctaactgaactcccacatatttttcttagagatggggtttcaccatgttggccaggatggtctcgatctcctgacttcatgatctgcctgcctcggcctcccaaaatgcacctaagattctccccagtggccgactgactgcctctcttcttccccctttcttccgcctctgagaaatagcactttctgtcctaggctactagtgcctgggccacacaccaatctatacctctttttttttttttttttttttttcaggtgcattgtcctgttttcccttttggcatgggtttatgctgagcctaccatgtatggggagatcctgtcccctaactatcctcaggcataccccagtgaggtagagaaatcttggaacatagaagttcctgaagggtatgggattcacctctacttcacccatctggacatagagctgtcagagaactgtgcgtatgactcggtgcaggtatgttataagcacaaaaagaatagagagagaagaccagggctgaggtagtggaataaggatgtgggagggagagccacctgtactcacagtgaactgaagtcaagtcctaggggcataaatgttctactctctctgtcccttctcttacctccataccaaaatattaccctttcctagcttttttattgttgctgttgactcttctcttagataatgtcaggagacattgaagaagggaggctctgtggacagaggaccagtaacaatccccactctccaattgtggaagagttccaagtcccatacaacaaactccaggtgatctttaagtcagacttttccaatgaagagcgttttacggggtttgctgcatactatgtcgccacaggtaaggctcacccttctgcatgtgccttattgacccagctaaaagattagaagtgagaaatccactgagcaacacgttgaatgaggattctgtttgtaattcatacaaaaagtgttgacttggcctgggtccctccataaatcacttttatgaaattcaaatgcatgatcatatcttagtggtgatgatgataatggtaataacacatattacataatacacagtaatttattgagagccactataaactgggtatgtgctggggatttttcctattttaacacaatcatcactttcacccttcaaggtaggtgttatttgctccatataaagatgaagaaaatatagactaggaaagttaataacttggcaagaatcacacgaggaatgtgtagtatttaaacccattcaatatatggcattcaaaccttcaaattctgggtacttctgtatctctctccaggttaaaatgaagctaggacatctcataaagccaaactattgtttagatttgatagaaggaccaacatcatataaagcaatgaatgtactgattcctccctgcagaaggcatcatcatgatgtttaccttgaagagcgtcatccctggagctgaaacgctctgtacatgagaaaagtcaaggatctctgacattaagagctccctaggccaggcgtggtggctcatgcctgtaatcccagcactttgggaggctgaggcgggtggattactggaggccaagagttaaagaccagcctcaccaacgtgatgaaatcctgtctctactaaaaatacgaaaaattaaccaggcatggtggcggtgcttgtgttcccagatcctcgggaggtggaggcatgagacttgcttgaacctgggaggcggaggttgcagtgagctgagatcacatcactgtactccagcctggttgacagagtgagtctctctctctctgtcacacgcacacatactgccctccagcctcagtgacagagtaaggctatgtcacacacaccacacacacacacacacacacacacacacacacagagcactccagcctcagtgacagagtgaggctatgtcacacacacacacacacacaccactccaacctcggtgacagagtgaggctatgtcacacacacacacacacacagagcactccagcctcggtgacagagtgaggctatgtcacacacacacacacacacacacacacacacacacacacacacacacacacatgagctcccttatacctgtgtagtggtagggctcgactctggaaccgtatgtcaggagagtaatatagaataataccagcctgacatgtgatcccttgagagatctttaagcaataggccttttctactttttcttatccttatggttttgggtttaacctcattctgccttcttggtgtttgttcttgacctcagcctctctctactctttgtagacataaatgaatgcacagattttgtagatgccccttgtagacatttcagcaacaatttcactggtggttacttctgctcctgccccctggaatacttcctccatgatgacatgaagaattgtggaggtgagcttggtgttaagagggttgcatgttccctgggatttggaatgactgagaccccagaaagggctttgtccacccttccaacttcgattaggcccagccttcatttggcatttcttcttcttttttatttttaaatttacttatttatttatgtattatttttaagaatttcaatagttttgggggtactggtggtttttggttacatggatgagttctttagtggtcaattctgagattttactgcacctgttacccgagcagtgtacactatacccaatgtgcagttttctcgtcccgcttccaacctcccccaatgctgagtccgctgagtccacagagtccattatatcactcagtattggcatctattcttagttactcataagctgagatgaagccacaagaagggaggaagataagactacagggtaaagttagttaattggagaaaagagatagatgtctgtaaagagtctactgggggctgttcataaccaggaaaggctccatcctaagcagagtgatggaaacctaataggacttgggtgttcctgctgatatctactgcatgtgtaattgctgcatccctccagttagggcggggatctctggttagtttgaatggagaactgtcagtttctgagagaaggaatcatagaatagtgcaggaattcctttgtttgatgctgtatttgattctccctttcactttttctctcttagttaattgcagtggggatgtattcactgcactgattggggagattgcaagtcccaattatcccaaaccgtatccagagaactcaaggtgtgaataccagatccgactggagaaagggttccaagtggtggtgactgtgcggagagaagattttgatgtggaaccagctgactcagagggaaactgccttgacagtttagttgtgcgtgacggttgattaatacccccaccctcaacttacacaaagagatctctccctgaagacaaagaaaaattttttttgagacagagtcttgctcttttgctcaagctggagtgcagtggtgcaagcacggctcactgtagccttgacctcttggactcaagcaagcctcccacctcagcctcctgagtagctaggcccacaggcgtgcgccaccatacccagctaacatttttattgtgattattattattattttttacagagatggggttttgctatgttgctcaggttggcctgaaactcctggcctcaagcaatgctcccacctcggcctcccaaagtgctgggattataggcgtgagccactgcactcagcctgaagataaaattatcttttctcctgacccttattttccttcttcttattttatgtgacattcaatgcctctcttatttttatctcccatcttccaattttacctctttcctttagttctttccctcttctgatttcatcatttcgttcagtttgttgcaggagatcagcaatttggtccttactgcggtcgtggattccctgggccactaaatattgaaaccaagagtaatgctcttgatatcatcttccaaactgatctaacagggcaaaacaagggctggaaacttcgctaccatggagatcgtgagtaacctagaagtacctctttggttggtgataccaaagtccccaaacaatgtgggatcaaagcaggtagatgatccaggcacaatggaagtacctgtgatctcagctaccaggggaggctgaggtaggaggatcccttgagcccaggaagtaggagtctgagtccactctggacaacagagcaaaactttgtctctaaaacaaaacaaaaacaaaacaacaataattcaaaaaacagatagattgttgttctgatagtatcctgagacacttcacttcctcaggaaaatctaaaccagtcaatggttgctaggaatgcctcaacccctagtaatcctttaactagacctgagagtgcagacagtttgggggtggttagttggtaatgccatatgattttagacatctgctatattggaatgttaagcatcaggaatgaggacaactggatgattttagaaagtgtgagaatgatgtaaatagaatgagagtcttcaactatttagtaattcttttttcctgtcccagcttctgttctttcaagcaatgccctgtcctaaagaagaaactcccacttctgtttgggagcctgcaaaggcaaaatatgtgtttagagatgtggtgtggataacctgtctggatgggtttgaaggttgtggagataaagtaccatcttggtttctccccaatccctggccccagatcaggatgagcagactgaaattgtccagttgtttaccaaagtaagtgtgtgatcaaggtataacgcctttcccataaacacgacagcttaagatctgtagttctcccttgtgagtcatggagctccctggccagcttggcattctctctctgccttcagtcttcttggggaaggggagttgacacgttggggcagagctgtctgtcatcctcgtctcctgggtgctttgggtcagtctgctaaggcgttcccaagcttcttgtggtgaggactcctcattgatccaaggccagagatcaattccagttttgattttggtttcccatatctctcttcagaaataagtggtgatgtttattattctccagggacgtgttggtgcaacatctttctattcgacttgtcaaagcaatggaaagtggagtaattccaaactgaaatgtcaacgtacgtgtctcttcaaagtggaagtctttctttttctctcagagagaatggaaagatcagcacatccaaattcagatgcatggtttcctcttaggcatggagggagtgggttgggtttttgaagggaagccagtcatggaggcttttctagtccagccccgaatctgttcccaggccaactagatcggcaagtttctttccaagaaaggggctatgggataggtcgagttaatagccccatgtgggtgcatttgtggcttccactgggccatcaccaatcgctgagaaccaggctcttcactacggctttcacggggccatctgagttggcatctcagtgggccagagacctgagaattgccagttggggaggatggccacagagaggctggtgtggggaggttcatcccaggtgtgcctgtggatatggggtggggaagcagtgaggatgaaactggccccatgactcctccttggaggaagtggctgtcctgaccatcgctctccttccttcgtctggtagctgtggactgtggcattcctgaatccattgagaatggtaaagttgaagacccagagagcactttgtttggttctgtcacccgctgcacttgtgaggagccgtattactacatggaaaatggaggaaatggtaggtttcttctactggaggagagagagtgagaaggtgttggaggttaaatagcataatctgtctgtgccggagagagtctgcagacaaatgaaggcgataggacagacagtgttcatccccttgacttcatccaaagatacacttttcatatggagcagggcacgctcagggcagcaccagtcacagggaatcatagaggtcaccagctcagcttcacagctgctgtaggaattcccctataacatccattccatgggattacccacctttggaccagttatttcatgtacagcccataggagcaatgcctccctctttaagccagcaagctacactgactggctttcttgacgtagaagggctgaatgagacactaatacgttctctgcattgcctttatttatttatttacttattttagacagagtctcactctgttgtccaggctggagtgtagtggtgtgatctcggctcactgcaacttctgcttcctgggttcaagtgattcttttgcctcagcctcctgagtagctgggattacaggtatatgccaccacgcccagctaattcttgtatttttagtagagacagggtttttaccatgttggtcaggctggtcttaaattcctgacctcgtgatccacctgccccagcctcccaaagtgctgggattacaggtgtaaggcaccgagcctggctgtattactttgtattttattttcccactttctcaatgccttctttccttctgctttggagatgttccctttgtctcccctggcaggctagaggcctgagggattgtttggaggaagatatttttttctggctgatttaatctgatttactacttgaatcccagaggagctgaggctctgaaggaacagagcgggctgtggggtggatggaagagggaagatgtggtggtgagtgtgacctgtgttctctgtgctattccagggcagtatcagtgtgctggtaatgggagctgggtgaatgaggcgctgagcccagagctgccgaaatgtgttccaggtaaggagggccgaggcttgggtagagatgataggcatgggtgaatgggagtcaccttctgaaagcagctgtaaccctcttgggaaaggactgaacagtggcctgccagagtccagctcagtgaggtggcagtagcactgtgccgtgggctgtcggggttgtggggaacctcctcagctacactgaagccaggtcgactgcaaggaaatataagcatcagccagcgacagttggtgtctggtaatgtagctgcagcgagaagatacagaactgctaaaaacagggcctgaaagctgagagtgagtaatcaacattcggaaacaagactagttaaataacctagttattatattaaaagtttatggctggtcatggtggctcatgcctgtaatcccagcactttgggaggccaaggcaggtgaatcatgaggtcaggagtttgaggccagcctggccaaaatggtgaaactccatctctactaaaaatataaaaaattagctgggtgtagtggcgggcacctgtaatcccatctacttgggagggtgaggcaggagaatagcttgaactcaggaggcggaggtttcagtgagccgagatcatgccactgcactgcagccttgaagacagtgggagacgctgtctcaaaaaaaaaaaaaaaaaaaaaaaaaaaaaaaaaaaaaaaaaaaaaaattacatggcaataagatatagaggaattcaagattcagggaacgagcgagatcaaggtttggtagcagaaggctggggaaaatccagtaggataataaccatcctggatgtaactgagagctgaagaccgagctgatttgttgtgtttattatctcattcacatccttgtaacagccctgtaagctaggtgtcattagtctcatttgaccggtcaatgggtgggtacaagtttgcagagttagcaagttgcgaaggcaggctttgagcccaggtgtgtctaagtccaaagcctgttgtgctcaacttggagtccctccaggctgtctagcaagggatttagggaagcagcttcacttgaattcagttattagtataactgaatggtaatggcaccagtcactgggagtgagaggtcaaggccaaagaagggacccctctctacttcctaggctgacctatggtttactaggagggactcaggtgcaactaggactccagtaaagaaggcgattaaagtttgatctgggcatctgaagaaggcagaaagcttccctcctccaccatctgtatgagaaaagggtttccagcactggctcttggttgggcactggcctcacatgccgagttgggaggtgcaaggtggacccctgcctccagaggggctgtgagtcacactgtggatagcgtgaggcactagtgcatctggactcagtgattcacacactgcctctggttaactgagctctgccatgagcctgctatgacatcggcaaagcggggtgtttaggtaagaccagggtgggtcaggtattgagcttgttgaccaaataggattgaccattttgtactagagaaccctgcaacctagcaggtaaaattctttgagtggttggaggatttgcaggaagccagtatcatttcttgctccttccccgtgttttttttaattccttcctagtctgtggagtccccagagaatcctttgaagaaaaacagaggataattggcggatctgatgcagatattaaaaacttcccctggcaagtcttctttgacaacccgtgggctggtggagcgctcattgatgagtactgggtgctgacggcagctcatgttgtggagggaaaccaggagccaacaatgtatgttgggtccacctcagtgcagacctcacggctggcaaaatccaagatgctgacttctgagcatgtatttattcatccgggatggaagctgctggaagtcccagaagcacaaacaaattttgataatgacattgcactggtgcagctgaaagactcagtgaaaatgggacccaacgtcgcccccatctgcctaccaggcacctcttctgactacaacctcatggatggggacctgggactgatcgcaggctggggccgaacagagaagagagatcgcgctcttcgcctcaaagcggcaaggttacctgtagctcctttaagaaagtgtagagaagtgaaagtggaaaaccccaaagcagatgcaggggcctatgttttcactcctaacatgatctgtgctggaggagagaagggcatggatagctgtaaaggggacagtggtggggcctttgctgtacaggatcccaatgacaaggccaaattctacgtagctggcctggtgtcctgggggccccagtgtgggacctatgggctctacacacgggtacagaactatgttgactggataatgaagactatgcaggaaaatagcaccccccagtaa

SEQ ID NO: 5 - DNA, 10589 bp, Macaca fascicularis
  source 1..10589: mol_type = other DNA
gcaatcggtgaaattccccattcctcctttcccgcttggagccctggatagaggcctctcaggcctgggaggaggatgctatccttgtttcaaaagcagagggagctccaagatcatggctgagttactctttccctatgtcatggtctcccagccccctctgtttagatcagggaatttcagacatgcacactcttaggaacagaacctggacagggaggctgaccggaggttcctgcagagggagcgtcaaggccctgtgccgctgtccccgggggccggaggggttgcccagcatgcccactggcaggagacaggggactgacccacttgctcctaccagcttctgaaggtaaaatccttacaaacgacgagcagagctttgatgcaggaagaaagaaaggcagagaacttcacgtaggagggcttggggcagtgatagagggctcacaaaggcagcataaaaaaaaaagcagaatataggcaacctatttctcttaggctcaccccatccacccctacttcacccccttacctaccactgttttcagggttaaagcaattttagcaagactttactaggaactgtggggagatagcttatattttcagtaagttggcaggggagtgggggtggcagcagggacaaaccccaaagaaactctggaaaacgaatgtaggaagtgtttatgttccttgtcatttggctgtcccttttctccttcctcacgcaaccctgtctcagtggggcagcacttccttcccagactgcttgttccaaggcccctgacttcccctagtgaaagaagctcctgcgtccatccgtgggcgttgggagcatcaacggagatgcacgcaatgataaacagcagacagggctgcttgaggagataaggagatcatggttaaagaagaggggctgtcctagatggatggtcatgatgcgcgaagactgctgaaaacccgagtggaaatgggagcattgttcttgagggcaggagagagactgataccgtcggggtggggctggtggaggacaacagaggaagaagaaaactgggagaaagtactcgatccctttggagaaaaattaggagaaagtccagagaagcaaggaggaaaggatacaatttagttatagtctagaaagttagttgaagttgaactaaggagggtgtgaggggcccggtgccatgtggcgatgttggtgatatggctctgtttaacctgtgtgttatccctttgaaggtgacactgagccccaggtgacgccacaccaccaaagaaggtgcctgtgtttgtcagacaaatacagccaggcctgccaccccttaggctccaaagtcccgaggtccagaaagccaggaccaagagacaggcagctcaccagggcggacgaatcgccagagatgtggtaagtcatcaagggtctccagaggttacacagactctattcccttcatcttctcaagaaaagtgctcatgggccaggcatgatggctcacacctataatcccagcactttaggagactgaggcaggagcattgcttgagcccaggactttgagaccagcctgggcaacataaggagaccctgtctctattaaaaaaaaaaaaaatgagcccagtgtggtgggtgtcatctgtggtcccagctactcaaaaggctgaggtagtaaaatcacttgagcgcaggaggtcaaggctgcagtgagctgagatcgcaccactgcactccagcctgggcgacagagtgagaccctgtctgaaaagaaaaaaaaaaaaggggggctcttatctgaagcctgggttttggtttgacctgggacttttctttattccgacctaagattctcccccatggccgaccgactgactacctctatcttcttcccccttctgcctctgacaaatagcgctttctgtcctaggctactagtgcctgggtcacccgccaatctatgcctcttttttttcaggtgcattgtcctgttttcccttttggcatgggtttatgctgagcctaccatgtatggggagatcctgtcccctaactatcctcaggcataccccagtgaggtagagaaatcttgggacatagaagttcctgaagggtatgggattcacctctacttcacccatctggacatagagctgtcagagaactgtgcgtatgactcagtgcaggtatgttataagcacaaaaagaatagagagagaagaccagggctgaggtagtagaataaggatgtgggagggagagccacctgtactcacagtgaactgaagtcaagtcctaggggcataaatgttctactctctctgtcccttctcttacctccataccaaaatattaccctttcctagcttttttattgttgctgttgactcttctcttagataatgtcaggagacattgaagaagggaggctctgtggacagaggaccagtaacaatccccactctccaattgtggaagagttccaagtcccatacaacaaactccaggtgatctttaagtcagacttttccaatgaagagcgttttacggggtttgctgcatactatgtcgccacaggtaaggctcacccttctgcatgtgccttattgacccagctaaaagattagaagtgagaaatccactgagcaacacgttgaatgaggattctgtttgtaattcatacaaaaagtgttgacttggcctgggtccctccataaatcacttttatgaaattcaaatgcatgatcacatcttagtggtgacgatgataatggtaataacacatattacataatacacagtaatttattgagagccactgtaaactgggtatgtgccggggatttttcctattttaacacaatcatcactttcacccttcaaggtaggtattattcgctccatataaagatgaagaaaataaggactaggaaagttaataacttgccaagaatcacacgaggaatgtgtagtatttaaacccattcaatatatggcattcaaaccttcaaattctgggtacttctgtatctctctccaggttaaaatgaagctaggacatctcataaagccaaactattgtttagatttgatagaaggaccaacatcatataaagcaatgaatgtactgattcctccctgcagaaggcatcatcatgatttttaccttgcagagcgtcatccctggagctgaaacgctctgtacatgagaaaagtcaaggacctctgacattaagagctccctaggccaggcgtggtggctcatgcctgtaatcccagcactttgggaggctgaggcgggtggattactggaggccaggagttaaagaccagcctcgccaacatggtgaaatcctgtatctattaaaaatacaaaatattaaccaggtttgtggtgcgtgcttgtgttcccagctcctcaggaggtggaggcatgagacttgcttgaacctgggaggtggaggttgcagtgagccgagatcgcaccactgcactccagcctgggtgagagagtgaggctatgtcacatacacacacacacacacacacacacacacacacacacacacacgagctcccttatagctgtgtagtggtagggttcaactctggaaccatatgtcaggggagtaatatagaataataccggcctgacatgcgatcccttgagggatctttaagcaacaggcctttcctactttttcttacccttatggttttaggtttaacctcattctgccttcttggtgtttgttcttgacctcagcctctctctactctttgtagacataaatgaatgcacagattttgtagatgccccttgtagccacttctgcaacaatttcattggtggttacttctgctcctgccccccggaatatttcctccatgatgacatgaagaattgtggaggtgagcttggtgttaagagggttgcatgttccctgggatttggaatggctgaggccctagaaagggctttgtccacccttccaacttctgttaggcccagccttcatttggcatttattccttttttattttaaaatttacttatttgtttgtttgtttatttatttatttatttattatttttaagaatttcagtagttttgggggtactggtgattcttggttacatggatgagttctttagtggtcaattctgagattttattgtacctgttacccgagcagtgtacactacacccaatgtgcagttttctcgcccccgtttcaacctcccccacactgagtccacagagtccattatatcactcagtattggcatctattcttagttactcataagctgagatgaagccacaagaagggaggaagataagactacagggtaaagttagttaattggagaaaagagatagatgtctgtaaagagtctactgggggctgttcataaccaggaaaggctctatcctaagcaaagtgatggaaacctaataggacttgggtgttcctgctgatatctactgcatgtgtaattgctgcatccctccagttagggcggggatctcaggttagtttgaatggaggactgtcagtttctgagagaaggaatcatagaatagtgcaggaattcctttgcttgacgccgtatttgattctccctttcactttttctctcttagttaattgcagtggggatgtattcactgcactgattggggagattgcaagtcccaattatcccaaaccatatccagagaactcaaggtgtgaataccagatccggctggagaaagggttccaagtggtggtgactgtgcggagagaagattttgatgtggaaccagctgactcagagggaaactgccttgacagtttagttgtgcgtgacggttgattaatacccccaccctcaacttacacaaagagatctctctctgaaaagaaagaaaaattttttttgagacagggtcttgctctattgctcaagctggagtgcagtggtgcaagcacggctcactgtagccttgacctcttggactcaagcaagcctcccacctcagcctcctgagtagctaggcccacaggcatgagccaccatacccagctaatatttttattgttatttatttatttatttatttacagagatggggttttgctatgttgctcaggttggcctgaaactcccgacctcaagcaatgctcccacctcggcctcacaaagtgctgggattataggtgtgagccactacactcagcctaaagataaaattatcttttctcctgacccttattttccttcttcttattttatgtgacattcaatgcctctcttatttttatctcccatcttccaattttacctctttcctttagttctttccctcttctgatttcatcatttcgttcagtttgttgcaggagatcagcaatttggtccttactgcggtcgtggattccctgggccactaaatattgaaaccaagagtaatgctcttgatatcatcttccaaactgatctaacagggcaaaacaagggctggaaacttcgctaccatggagatcgtgagtaacctagaagaccctctttggttggtgataccaaagtccccaaacaatgtgggatcaaagcaggtagatgatccaggcacaatggaagtacctgtgatctcagctactaggggaggctgaggcaggaggatcccttgatcccaggaagtaggagtctgagtccactctgggcaacagagcaaaaccttgtctctaaaacaaaacaaaaacaaagcaacaataatttaaaaaacagatagattgttgttctgatagtatcctgagattcttcacttcctcaggaaaatctaaaccagtcaatggttgctaggaatgcctcaacctctagtaatcctttaactagacctgagagtgcagacagcttgggggtggttagttggtaatgccatatgattttagacatctgctgtattggaatgttaagcatcaggaatgaggacaactggatgattttagaaagtgtgagaatgatgtaaatagaatgagagtcttcaactatttagtaacgtttttttcttgccccaacttctgttctttcaagcaatgccctgtcctaaagaagaaactcccacttctgtttgggagcctgcgaaggcaaaatatgtgtttagagatgtggtgcggataacctgtctggatgggtttgaagttgtggaggtaaagtaccatcttggcttctccccaatccctgaccccagatcaggatgagcagactgaaattgtccagttgtttaccaacgtaagtgtgtgatcaaggtataacgcctttcccataaacacgacagcttaagatctgtagttctcccttgtgagtcatggagctccctggccagcttggcattctctctctgccttcagtcttcttggggaaggggagttgacacgttggggcagagctgtctgtcagcctcatctcctgggtgctttgggtcagtctgctaagacgttcccaagcttcttgtggtgaggactcctcattgatccaaggccagagatcaattccagttttgattttggtttcccatatttctcttcagaaataagtggtgatgtttgttattctccagggacgtgttggtgcaacatctttccattcgacttgtcaaagcaatggaaagtggagtaattccaaactgaaatgtcaacgtacgtgtctcttcaaagtggaagtctttctttttctctcagagagaatggaaagatcagcacatccaaattcagatgcatggtttcctcttaggcatggagggagtgggttgggtttttgaagggaagccagtcatggaggcttttctagtccagccccgaatctgttcccaggccaactagatcggcaagtttctttccaagaaaggggctatgggataggtcgagttaatagtcccatgtgggtgcatttgtggcttccactgggccatcaccaatcgctgagaaccaggctcttcactacggctttcatggggccatctgagttggcatctcagtgggccagagacctgagaattgccagttggggaggatggccacagagaggctggtgtggggaggttcatcccaggtgtgcctgtggatatggggtggggaagcagtgaggatgaaactggccccatgactcctccttggaggaagtggctgtcctgaccatcgctctccttccttcgtctggtagctgtggactgtggcattcctgaatccattgagaatggtaaagttgaagacccagagagcactttgtttggttctgtcacccgctacacttgtgaggagccgtattactacatggaaaatggaggaaatggtaggtttcttctactggagaagagagagagtgagaaggtgttggagggtgaatagcataatctgtctgtgccggagagagtctgcagacaaatgaaggcgataggacagacagtgttcatccccttggcttcatccaaagatacacttttcatatggagcagggcacgcgcagggcagcaccagtcacagggaatcatagaggtcaccagctcagcttcatagctgctgcaggaattcccctacaacatccatttcatgggattacccacctttggaccagttatttcatgtaaaacccacaggagcaatgcctcccgcttcaagacagcaagctacactgactggctttcttgatgtagaggctttggtcgtgctagatgaagggctggatgagacactatacattctctgcattgctttgtatttattttcccagtttctcaatgccttctttccttctgctttggagatgttccctttgtctcccctggcgggctagaggcctgagggattgtttggaggaagatattttttttctggctgatttaatctgatttactacttgaatcccagaggagctgaggctctgaaggaacagagcgggctgtggggtggatggaagagggagggaagatgcggtagtgagtgtggcctgtgttctctgtgctattccagggcagtatcactgtgctagtaatgggagctgggtgaatgaggcgctgagcccagagctgccgaaatgcgttccaggtaaggagggccgaggcttggggagagatgataggcatgggtgaatgggagtcaccttctgaaagcagctgtaaccctcttgggaaaggactgaacagtggcctgccagagtccagctcagtgaggtggcagtagcactgtgccgtgggctgtcggggctgtggggaacctcctcagctacactgaagccaggccgactgcaaggaaatataagcgtcagccagcgacagttggtgtctggtaatgtagctgcaacaagaagatacagaactgctaaaaacagggcctgaaaactgagagtgagtaatcaacattcggaaacaagactagttaaataacctagttattatattaaaagtttatatggcagcaagatatcaaggaattcaagtaacgaggaagatcaaagttgggtagcagaaggctggggcaaatccagtaggatgaagaccatcctggttgttactgagaacgaaagaccaagtttatttgttgtgtttattatctcattcatgtccttgtaacagccccgtgagctaggtgtcattagtcttatttgaccagtcaatgggtgggtgcaagtttgcagagttagcaagttgtgaaggccggctttgagcccaggtttgtctaagtccaaagcctgttgtgctcaacttggagtccctccaggctgtctagcaagggacttaggtaagcagcttcacttgaattcagttattagtataactgaatggtaatggcaccagtcactgggagtgacaggtcgaggccaaagaaggaacccctctctacttcctaggctgacctatggtttactaggagggactcaggtgcaactaggactccagtaaagaaggcgattaaagtttgatctgggcatctgaagaaggcagaaagcttccctcctccaccatctgtgtgagaaaagggtttccagcactggctcttggttgggcgctggcctcacatgccgagttgggaggtgcaagggggacccctgcctccagaggggctgtgagtcacactgtggatagcgtgaggcaccagtgcatctggactcagtgattcacacactgcctctggttaactgagctctgccatgagcctgctatgacatcggcaaagcggggtgtttaggtaagaccagggtgggtcaggtattgagcttgttgaccaaataggattgaccattttgtactagagaaccctgcaacctagcaggtaaaattctttgagtggttggaggatttgcaggaagccagtatcatttcttgctccttccccgtgttttttttattccttcctagtctgtggagtccccagagaaccttttgaaggaaaacagaggataattggcggatccgatgcagatattaaaaacttcccctggcaagtcttctttgacaacccgtgggctggtggagcgctcattgatgagtactgggtgctgacggcagctcatgttgtggagggaaaccaggagccaacaatgtatgttgggtccacctcagtgcagacctcacggctggcaaaatccaagatgctgacttctgagcgtgtgtttattcatccgggatggaagctgctggaagtcccagaagcacgaacaaattttgataatgacattgcactggtgcagctgaaagacccagtgaaaatgggacccaccgtcgcccccatctgcctaccaggcacctcttctgactacaacctcatggatggggacctgggactgatcgcaggctggggccgaacagagaagagagatcgcgctcttcgcctcaaagcggcaaggttacctgtagctcctttaagaaagtgtagagaagtgaaagtggaaaaccccaaagcagatgcaggggcctatgttttcactcctaacatgatctgtgctggaggagagaagggcatggatagctgtaaaggggacagtggtggggcctttgctgtacaggatcccaatgacaaggccaaattctacgtagctggcctggtgtcctgggggccccagtgtgggacctatgggctctacacacgggtacagaactatgttgactggataaagaagactatgcaggaaaatagcacccccagtaaggattaatccagatacatcccaccagcctctccaaggggcgtgaccaatgcattgccttctgttccttatgatattctcattatttcatcatgactaaaggaagacacgagtgaatgatttaaatagaacttgattgttgagatgcctggctggaagtagagaggtagagtttgatcatagaattgtgctggtcatacatttttagtctaactccttggggtcctttcccttgagtacctattgtagataacactatgggtggggcactcctatcttgcactattccacagggataccttaattctttgtttctttctttacctgttcaaaattccatttacttgatcattctcagtatccactgtctatgtagaataaagtatgtttataagcaaa

SEQ ID NO: 6 - DNA, 82774 bp, Homo sapiens; identical to SEQ ID NO: 3
  source 1..82774: mol_type = other DNA

SEQ ID NO: 7-26 - skipped (20 entries)

SEQ ID NO: 27 - DNA, 16 bp, synthetic construct
  misc_feature 1..16: note = Synthetic oligonucleotide
  source 1..16: mol_type = other DNA
aaagttgttaccttca

SEQ ID NO: 28 - DNA, 18 bp, synthetic construct
  misc_feature 1..18: note = Synthetic oligonucleotide
  source 1..18: mol_type = other DNA
caaagcttctctctttaa

SEQ ID NO: 29 - DNA, 17 bp, synthetic construct
  misc_feature 1..17: note = Synthetic oligonucleotide
  source 1..17: mol_type = other DNA
ttccttcatcaaagctt

SEQ ID NO: 30 - DNA, 17 bp, synthetic construct
  misc_feature 1..17: note = Synthetic oligonucleotide
  source 1..17: mol_type = other DNA
ctttcacaaattgcctc

SEQ ID NO: 31 - DNA, 16 bp, synthetic construct
  misc_feature 1..16: note = Synthetic oligonucleotide
  source 1..16: mol_type = other DNA
aaggtatcttcccata

SEQ ID NO: 32 - DNA, 16 bp, synthetic construct
  misc_feature 1..16: note = Synthetic oligonucleotide
  source 1..16: mol_type = other DNA
cccttacttttctcga

SEQ ID NO: 33 - DNA, 17 bp, synthetic construct
  misc_feature 1..17: note = Synthetic oligonucleotide
  source 1..17: mol_type = other DNA
agatatgctttccctta

SEQ ID NO: 34 - DNA, 16 bp, synthetic construct
  misc_feature 1..16: note = Synthetic oligonucleotide
  source 1..16: mol_type = other DNA
ttgacaagctattaca

SEQ ID NO: 35 - DNA, 17 bp, synthetic construct
  misc_feature 1..17: note = Synthetic oligonucleotide
  source 1..17: mol_type = other DNA
ccaatattcctacaatt

SEQ ID NO: 36 - DNA, 16 bp, synthetic construct
  misc_feature 1..16: note = Synthetic oligonucleotide
  source 1..16: mol_type = other DNA
ccagccctcaattaac

SEQ ID NO: 37 - DNA, 16 bp, synthetic construct
  misc_feature 1..16: note = Synthetic oligonucleotide
  source 1..16: mol_type = other DNA
gatttagactaacttc

SEQ ID NO: 38 - DNA, 17 bp, synthetic construct
  misc_feature 1..17: note = Synthetic oligonucleotide
  source 1..17: mol_type = other DNA
gataccatgacaccctc

SEQ ID NO: 39 - DNA, 18 bp, synthetic construct
  misc_feature 1..18: note = Synthetic oligonucleotide
  source 1..18: mol_type = other DNA
ctttatctgacaaataca

SEQ ID NO: 40 - DNA, 17 bp, synthetic construct
  misc_feature 1..17: note = Synthetic oligonucleotide
  source 1..17: mol_type = other DNA
tcacttaccacatccct

SEQ ID NO: 41 - DNA, 17 bp, synthetic construct
  misc_feature 1..17: note = Synthetic oligonucleotide
  source 1..17: mol_type = other DNA
gatcacttaccacatcc

SEQ ID NO: 42 - DNA, 17 bp, synthetic construct
  misc_feature 1..17: note = Synthetic oligonucleotide
  source 1..17: mol_type = other DNA
ctgatcacttaccacat

SEQ ID NO: 43 - DNA, 17 bp, synthetic construct
  misc_feature 1..17: note = Synthetic oligonucleotide
  source 1..17: mol_type = other DNA
acctgatcacttaccac

SEQ ID NO: 44 - DNA, 16 bp, synthetic construct
  misc_feature 1..16: note = Synthetic oligonucleotide
  source 1..16: mol_type = other DNA
atacctgatcacttac

SEQ ID NO: 45 - DNA, 16 bp, synthetic construct
  misc_feature 1..16: note = Synthetic oligonucleotide
  source 1..16: mol_type = other DNA
ggaaatcacatacaac

SEQ ID NO: 46 - DNA, 19 bp, synthetic construct
  misc_feature 1..19: note = Synthetic oligonucleotide
  source 1..19: mol_type = other DNA
gaataaacaaatatataca

SEQ ID NO: 47 - DNA, 17 bp, synthetic construct
  misc_feature 1..17: note = Synthetic oligonucleotide
  source 1..17: mol_type = other DNA
aacaggaccaaacacct

SEQ ID NO: 48 - DNA, 15 bp, synthetic construct
  misc_feature 1..15: note = Synthetic oligonucleotide
  source 1..15: mol_type = other DNA
tttcacgacgtcatt

SEQ ID NO: 49 - DNA, 16 bp, synthetic construct
  misc_feature 1..16: note = Synthetic oligonucleotide
  source 1..16: mol_type = other DNA
gacttcaatgtcccaa

SEQ ID NO: 50 - DNA, 17 bp, synthetic construct
  misc_feature 1..17: note = Synthetic oligonucleotide
  source 1..17: mol_type = other DNA
cctaaatcctctcattc

SEQ ID NO: 51 - DNA, 17 bp, synthetic construct
  misc_feature 1..17: note = Synthetic oligonucleotide
  source 1..17: mol_type = other DNA
acacacagccccctaaa

SEQ ID NO: 52 - DNA, 16 bp, synthetic construct
  misc_feature 1..16: note = Synthetic oligonucleotide
  source 1..16: mol_type = other DNA
gcagaacctttactcc

SEQ ID NO: 53 - DNA, 17 bp, synthetic construct
  misc_feature 1..17: note = Synthetic oligonucleotide
  source 1..17: mol_type = other DNA
tgaaactcttctataat

SEQ ID NO: 54 - DNA, 18 bp, synthetic construct
  misc_feature 1..18: note = Synthetic oligonucleotide
  source 1..18: mol_type = other DNA
actgaaactcttctataa

SEQ ID NO: 55 - DNA, 17 bp, synthetic construct
  misc_feature 1..17: note = Synthetic oligonucleotide
  source 1..17: mol_type = other DNA
actgaaactcttctata

SEQ ID NO: 56 - DNA, 15 bp, synthetic construct
  misc_feature 1..15: note = Synthetic oligonucleotide
  source 1..15: mol_type = other DNA
cgtaaaccgttcttc

SEQ ID NO: 57 - DNA, 15 bp, synthetic construct
  misc_feature 1..15: note = Synthetic oligonucleotide
  source 1..15: mol_type = other DNA
cggatgccttaccta

SEQ ID NO: 58 - DNA, 17 bp, synthetic construct
  misc_feature 1..17: note = Synthetic oligonucleotide
  source 1..17: mol_type = other DNA
atcctcatttcatgcac

SEQ ID NO: 59 - DNA, 17 bp, synthetic construct
  misc_feature 1..17: note = Synthetic oligonucleotide
  source 1..17: mol_type = other DNA
cgataaagtcacacaaa

SEQ ID NO: 60 - DNA, 17 bp, synthetic construct
  misc_feature 1..17: note = Synthetic oligonucleotide
  source 1..17: mol_type = other DNA
tgctttaccaccactaa

SEQ ID NO: 61 - DNA, 16 bp, synthetic construct
  misc_feature 1..16: note = Synthetic oligonucleotide
  source 1..16: mol_type = other DNA
cattatctgctttacc

SEQ ID NO: 62 - DNA, 17 bp, synthetic construct
  misc_feature 1..17: note = Synthetic oligonucleotide
  source 1..17: mol_type = other DNA
tctcagtctcattatct

SEQ ID NO: 63 - DNA, 16 bp, synthetic construct
  misc_feature 1..16: note = Synthetic oligonucleotide
  source 1..16: mol_type = other DNA
accatgccgaccacac

SEQ ID NO: 64 - DNA, 16 bp, synthetic construct
  misc_feature 1..16: note = Synthetic oligonucleotide
  source 1..16: mol_type = other DNA
gatccgtatctttata

SEQ ID NO: 65 - DNA, 16 bp, synthetic construct
  misc_feature 1..16: note = Synthetic oligonucleotide
  source 1..16: mol_type = other DNA
gcgttctctttacttc

SEQ ID NO: 66 - DNA, 17 bp, synthetic construct
  misc_feature 1..17: note = Synthetic oligonucleotide
  source 1..17: mol_type = other DNA
atagcaaccatttcact

SEQ ID NO: 67 - DNA, 16 bp, synthetic construct
  misc_feature 1..16: note = Synthetic oligonucleotide
  source 1..16: mol_type = other DNA
tcgttattccttctac

SEQ ID NO: 68 - DNA, 16 bp, synthetic construct
  misc_feature 1..16: note = Synthetic oligonucleotide
  source 1..16: mol_type = other DNA
ttcgttattccttcta

SEQ ID NO: 69 - DNA, 17 bp, synthetic construct
  misc_feature 1..17: note = Synthetic oligonucleotide
  source 1..17: mol_type = other DNA
ttcttattactatccat

SEQ ID NO: 70 - DNA, 19 bp, synthetic construct
  misc_feature 1..19: note = Synthetic oligonucleotide
  source 1..19: mol_type = other DNA
atttcttattactatccat

SEQ ID NO: 71 - DNA, 18 bp, synthetic construct
  misc_feature 1..18: note = Synthetic oligonucleotide
  source 1..18: mol_type = other DNA
catttcttattactatcc

SEQ ID NO: 72 - DNA, 18 bp, synthetic construct
  misc_feature 1..18: note = Synthetic oligonucleotide
  source 1..18: mol_type = other DNA
tagcatttcttattacta

SEQ ID NO: 73 - DNA, 17 bp, synthetic construct
  misc_feature 1..17: note = Synthetic oligonucleotide
  source 1..17: mol_type = other DNA
ttagcatttcttattac

SEQ ID NO: 74 - DNA, 16 bp, synthetic construct
  misc_feature 1..16: note = Synthetic oligonucleotide
  source 1..16: mol_type = other DNA
ctatttatatacccct

SEQ ID NO: 75 - DNA, 17 bp, synthetic construct
  misc_feature 1..17: note = Synthetic oligonucleotide
  source 1..17: mol_type = other DNA
gccctccttttaatttt

SEQ ID NO: 76 - DNA, 17 bp, synthetic construct
  misc_feature 1..17: note = Synthetic oligonucleotide
  source 1..17: mol_type = other DNA
cagccctccttttaatt

SEQ ID NO: 77 - DNA, 17 bp, synthetic construct
  misc_feature 1..17: note = Synthetic oligonucleotide
  source 1..17: mol_type = other DNA
gtgattatcttttaata

SEQ ID NO: 78 - DNA, 17 bp, synthetic construct
  misc_feature 1..17: note = Synthetic oligonucleotide
  source 1..17: mol_type = other DNA
aagcattcattcactaa

SEQ ID NO: 79 - DNA, 17 bp, synthetic construct
  misc_feature 1..17: note = Synthetic oligonucleotide
  source 1..17: mol_type = other DNA
atcctttcagacacaaa

SEQ ID NO: 80 - DNA, 17 bp, synthetic construct
  misc_feature 1..17: note = Synthetic oligonucleotide
  source 1..17: mol_type = other DNA
ctgcttatacattcctt

SEQ ID NO: 81 - DNA, 17 bp, synthetic construct
  misc_feature 1..17: note = Synthetic oligonucleotide
  source 1..17: mol_type = other DNA
tcctgcttatacattcc

SEQ ID NO: 82 - DNA, 17 bp, synthetic construct
  misc_feature 1..17: note = Synthetic oligonucleotide
  source 1..17: mol_type = other DNA
aggcctaacttcatttt

SEQ ID NO: 83 - DNA, 17 bp, synthetic construct
  misc_feature 1..17: note = Synthetic oligonucleotide
  source 1..17: mol_type = other DNA
ttaggacctactttata

SEQ ID NO: 84 - DNA, 16 bp, synthetic construct
  misc_feature 1..16: note = Synthetic oligonucleotide
  source 1..16: mol_type = other DNA
aactatacaacaccct

SEQ ID NO: 85 - DNA, 19 bp, synthetic construct
  misc_feature 1..19: note = Synthetic oligonucleotide
  source 1..19: mol_type = other DNA
tacaaactatacaacaccc

SEQ ID NO: 86 - DNA, 19 bp, synthetic construct
  misc_feature 1..19: note = Synthetic oligonucleotide
  source 1..19: mol_type = other DNA
gtacaaactatacaacacc

SEQ ID NO: 87 - DNA, 15 bp, synthetic construct
  misc_feature 1..15: note = Synthetic oligonucleotide
  source 1..15: mol_type = other DNA
gcgtacaaactatac

SEQ ID NO: 88 - DNA, 15 bp, synthetic construct
  misc_feature 1..15: note = Synthetic oligonucleotide
  source 1..15: mol_type = other DNA
ttgcgtacaaactat

SEQ ID NO: 89 - DNA, 17 bp, synthetic construct
  misc_feature 1..17: note = Synthetic oligonucleotide
  source 1..17: mol_type = other DNA
caccatgaaaaccctat

SEQ ID NO: 90 - DNA, 18 bp, synthetic construct
  misc_feature 1..18: note = Synthetic oligonucleotide
  source 1..18: mol_type = other DNA
aatctaaactacttttct

SEQ ID NO: 91 - DNA, 20 bp, synthetic construct
  misc_feature 1..20: note = Synthetic oligonucleotide
  source 1..20: mol_type = other DNA
atacaatctaaactactttt

SEQ ID NO: 92 - DNA, 19 bp, synthetic construct
  misc_feature 1..19: note = Synthetic oligonucleotide
  source 1..19: mol_type = other DNA
gaatacaatctaaactact

SEQ ID NO: 93 - DNA, 16 bp, synthetic construct
  misc_feature 1..16: note = Synthetic oligonucleotide
  source 1..16: mol_type = other DNA
tacgaatacaatctaa

SEQ ID NO: 94 - DNA, 15 bp, synthetic construct
  misc_feature 1..15: note = Synthetic oligonucleotide
  source 1..15: mol_type = other DNA
tctacgaatacaatc

SEQ ID NO: 95 - DNA, 19 bp, synthetic construct
  misc_feature 1..19: note = Synthetic oligonucleotide
  source 1..19: mol_type = other DNA
cccatattttaaaatctac

SEQ ID NO: 96 - DNA, 18 bp, synthetic construct
  misc_feature 1..18: note = Synthetic oligonucleotide
  source 1..18: mol_type = other DNA
cccatattttaaaatcta

SEQ ID NO: 97 - DNA, 19 bp, synthetic construct
  misc_feature 1..19: note = Synthetic oligonucleotide
  source 1..19: mol_type = other DNA
ttgatattttatactacat

SEQ ID NO: 98 - DNA, 19 bp, synthetic construct
  misc_feature 1..19: note = Synthetic oligonucleotide
  source 1..19: mol_type = other DNA
taaatcttaacacacttta

SEQ ID NO: 99 - DNA, 18 bp, synthetic construct
  misc_feature 1..18: note = Synthetic oligonucleotide
  source 1..18: mol_type = other DNA
taaatcttaacacacttt

SEQ ID NO: 100 - DNA, 19 bp, synthetic construct
  misc_feature 1..19: note = Synthetic oligonucleotide
  source 1..19: mol_type = other DNA
aaataaatcttaacacact

SEQ ID NO: 101 - DNA, 21 bp, synthetic construct
  misc_feature 1..21: note = Synthetic oligonucleotide
  source 1..21: mol_type = other DNA
taaaataaatcttaacacact

SEQ ID NO: 102 - DNA, 18 bp, synthetic construct
  misc_feature 1..18: note = Synthetic oligonucleotide
  source 1..18: mol_type = other DNA
agcaagcaaaacacctac

SEQ ID NO: 103 - DNA, 16 bp, synthetic construct
  misc_feature 1..16: note = Synthetic oligonucleotide
  source 1..16: mol_type = other DNA
tcctcagataccctat

SEQ ID NO: 104 - DNA, 16 bp, synthetic construct
  misc_feature 1..16: note = Synthetic oligonucleotide
  source 1..16: mol_type = other DNA
caacgctataattcca

SEQ ID NO: 105 - DNA, 17 bp, synthetic construct
  misc_feature 1..17: note = Synthetic oligonucleotide
  source 1..17: mol_type = other DNA
cacaacgctataattcc

SEQ ID NO: 106 - DNA, 16 bp, synthetic construct
  misc_feature 1..16: note = Synthetic oligonucleotide
  source 1..16: mol_type = other DNA
ctcacaacgctataat

SEQ ID NO: 107 - DNA, 17 bp, synthetic construct
  misc_feature 1..17: note = Synthetic oligonucleotide
  source 1..17: mol_type = other DNA
tatgtgctatcattcca

SEQ ID NO: 108 - DNA, 16 bp, synthetic construct
  misc_feature 1..16: note = Synthetic oligonucleotide
  source 1..16: mol_type = other DNA
aaccattattatgtac

SEQ ID NO: 109 - DNA, 16 bp, synthetic construct
  misc_feature 1..16: note = Synthetic oligonucleotide
  source 1..16: mol_type = other DNA
ccacttggacaaaaac

SEQ ID NO: 110 - DNA, 17 bp, synthetic construct
  misc_feature 1..17: note = Synthetic oligonucleotide
  source 1..17: mol_type = other DNA
tcttacacaatcctaat

SEQ ID NO: 111 - DNA, 18 bp, synthetic construct
  misc_feature 1..18: note = Synthetic oligonucleotide
  source 1..18: mol_type = other DNA
ctcttacacaatcctaat

SEQ ID NO: 112 - DNA, 17 bp, synthetic construct
  misc_feature 1..17: note = Synthetic oligonucleotide
  source 1..17: mol_type = other DNA
aagctcttacacaatcc

SEQ ID NO: 113 - DNA, 18 bp, synthetic construct
  misc_feature 1..18: note = Synthetic oligonucleotide
  source 1..18: mol_type = other DNA
acaagctcttacacaatc

SEQ ID NO: 114 - DNA, 17 bp, synthetic construct
  misc_feature 1..17: note = Synthetic oligonucleotide
  source 1..17: mol_type = other DNA
acaagctcttacacaat

SEQ ID NO: 115 - DNA, 17 bp, synthetic construct
  misc_feature 1..17: note = Synthetic oligonucleotide
  source 1..17: mol_type = other DNA
tagacaagctcttacac

SEQ ID NO: 116 - DNA, 17 bp, synthetic construct
  misc_feature 1..17: note = Synthetic oligonucleotide
  source 1..17: mol_type = other DNA
ggcaactaatttattac

SEQ ID NO: 117 - DNA, 16 bp, synthetic construct
  misc_feature 1..16: note = Synthetic oligonucleotide
  source 1..16: mol_type = other DNA
actcttaggtcaccac

SEQ ID NO: 118 - DNA, 16 bp, synthetic construct
  misc_feature 1..16: note = Synthetic oligonucleotide
  source 1..16: mol_type = other DNA
gccccaagaacatcat

SEQ ID NO: 119 - DNA, 16 bp, synthetic construct
  misc_feature 1..16: note = Synthetic oligonucleotide
  source 1..16: mol_type = other DNA
cgcaaaaccttttctc

SEQ ID NO: 120 - DNA, 16 bp, synthetic construct
  misc_feature 1..16: note = Synthetic oligonucleotide
  source 1..16: mol_type = other DNA
cttaaatactctccaa

SEQ ID NO: 121 - DNA, 17 bp, synthetic construct
  misc_feature 1..17: note = Synthetic oligonucleotide
  source 1..17: mol_type = other DNA
tgcttaaatactctcca

SEQ ID NO: 122 - DNA, 17 bp, synthetic construct
  misc_feature 1..17: note = Synthetic oligonucleotide
  source 1..17: mol_type = other DNA
ttgcttaaatactctcc

SEQ ID NO: 123 - DNA, 21 bp, synthetic construct
  misc_feature 1..21: note = Synthetic oligonucleotide
  source 1..21: mol_type = other DNA
cacaaacaaacaaactaaacc

SEQ ID NO: 124 - DNA, 20 bp, synthetic construct
  misc_feature 1..20: note = Synthetic oligonucleotide
  source 1..20: mol_type = other DNA
gcacaaacaaacaaactaaa

SEQ ID NO: 125 - DNA, 17 bp, synthetic construct
  misc_feature 1..17: note = Synthetic oligonucleotide
  source 1..17: mol_type = other DNA
cagaagtatccaccaat

SEQ ID NO: 126 - DNA, 16 bp, synthetic construct
  misc_feature 1..16: note = Synthetic oligonucleotide
  source 1..16: mol_type = other DNA
ggctaaactcacctcc

SEQ ID NO: 127 - DNA, 16 bp, synthetic construct
  misc_feature 1..16: note = Synthetic oligonucleotide
  source 1..16: mol_type = other DNA
aggctaaactcacctc

SEQ ID NO: 128 - DNA, 17 bp, synthetic construct
  misc_feature 1..17: note = Synthetic oligonucleotide
  source 1..17: mol_type = other DNA
aatccatcccaaatccc

SEQ ID NO: 129 - DNA, 16 bp, synthetic construct
  misc_feature 1..16: note = Synthetic oligonucleotide
  source 1..16: mol_type = other DNA
actaagccctcaatcc

SEQ ID NO: 130 - DNA, 17 bp, synthetic construct
  misc_feature 1..17: note = Synthetic oligonucleotide
  source 1..17: mol_type = other DNA
aaagcctaatcaaactt

SEQ ID NO: 131 - DNA, 16 bp, synthetic construct
  misc_feature 1..16: note = Synthetic oligonucleotide
  source 1..16: mol_type = other DNA
atggaccttatcttcc

SEQ ID NO: 132 - DNA, 17 bp, synthetic construct
  misc_feature 1..17: note = Synthetic oligonucleotide
  source 1..17: mol_type = other DNA
attgtatccttataact

SEQ ID NO: 133 - DNA, 17 bp, synthetic construct
  misc_feature 1..17: note = Synthetic oligonucleotide
  source 1..17: mol_type = other DNA
acattgtatccttataa

SEQ ID NO: 134 - DNA, 16 bp, synthetic construct
  misc_feature 1..16: note = Synthetic oligonucleotide
  source 1..16: mol_type = other DNA
aacattgtatccttat

SEQ ID NO: 135 - DNA, 20 bp, synthetic construct
  misc_feature 1..20: note = Synthetic oligonucleotide
  source 1..20: mol_type = other DNA
caccatgaaccaaaataaac

SEQ ID NO: 136 - DNA, 17 bp, synthetic construct
  misc_feature 1..17: note = Synthetic oligonucleotide
  source 1..17: mol_type = other DNA
aactttgctctaccatc

SEQ ID NO: 137 - DNA, 18 bp, synthetic construct
  misc_feature 1..18: note = Synthetic oligonucleotide
  source 1..18: mol_type = other DNA
tcttaatcatctccaaaa

SEQ ID NO: 138 - DNA, 17 bp, synthetic construct
  misc_feature 1..17: note = Synthetic oligonucleotide
  source 1..17: mol_type = other DNA
tcttaatcatctccaaa

SEQ ID NO: 139 - DNA, 17 bp, synthetic construct
  misc_feature 1..17: note = Synthetic oligonucleotide
  source 1..17: mol_type = other DNA
taaaccaactttacctc

SEQ ID NO: 140 - DNA, 17 bp, synthetic construct
  misc_feature 1..17: note = Synthetic oligonucleotide
  source 1..17: mol_type = other DNA
aataaaccaactttacc

SEQ ID NO: 141 - DNA, 17 bp, synthetic construct
  misc_feature 1..17: note = Synthetic oligonucleotide
  source 1..17: mol_type = other DNA
caataaaccaactttac

SEQ ID NO: 142 - DNA, 19 bp, synthetic construct
  misc_feature 1..19: note = Synthetic oligonucleotide
  source 1..19: mol_type = other DNA
ttttccaataaaccaactt

SEQ ID NO: 143 - DNA, 17 bp, synthetic construct
  misc_feature 1..17: note = Synthetic oligonucleotide
  source 1..17: mol_type = other DNA
ttttccaataaaccaac

SEQ ID NO: 144 - DNA, 21 bp, synthetic construct
  misc_feature 1..21: note = Synthetic oligonucleotide
  source 1..21: mol_type = other DNA
ccctcttttccaataaaccaa

SEQ ID NO: 145 - DNA, 18 bp, synthetic construct
  misc_feature 1..18: note = Synthetic oligonucleotide
  source 1..18: mol_type = other DNA
ccctcttttccaataaac

SEQ ID NO: 146 - DNA, 18 bp, synthetic construct
  misc_feature 1..18: note = Synthetic oligonucleotide
  source 1..18: mol_type = other DNA
tccctcttttccaataaa

SEQ ID NO: 147 - DNA, 17 bp, synthetic construct
  misc_feature 1..17: note = Synthetic oligonucleotide
  source 1..17: mol_type = other DNA
attacccacaatgctat

SEQ ID NO: 148 - DNA, 16 bp, synthetic construct
  misc_feature 1..16: note = Synthetic oligonucleotide
  source 1..16: mol_type = other DNA
ccatgaagcaattacc

SEQ ID NO: 149 - DNA, 17 bp, synthetic construct
  misc_feature 1..17: note = Synthetic oligonucleotide
  source 1..17: mol_type = other DNA
cagactagcctaccatc

SEQ ID NO: 150 - DNA, 16 bp, synthetic construct
  misc_feature 1..16: note = Synthetic oligonucleotide
  source 1..16: mol_type = other DNA
ttccttacctcataac

SEQ ID NO: 151 - DNA, 19 bp, synthetic construct
  misc_feature 1..19: note = Synthetic oligonucleotide
  source 1..19: mol_type = other DNA
tgaacacatctccactaca

SEQ ID NO: 152 - DNA, 17 bp, synthetic construct
  misc_feature 1..17: note = Synthetic oligonucleotide
  source 1..17: mol_type = other DNA
aacacatctccactaca

SEQ ID NO: 153 - DNA, 17 bp, synthetic construct
  misc_feature 1..17: note = Synthetic oligonucleotide
  source 1..17: mol_type = other DNA
aatctggtattcacacc

SEQ ID NO: 154 - DNA, 20 bp, synthetic construct
  misc_feature 1..20: note = Synthetic oligonucleotide
  source 1..20: mol_type = other DNA
cacatcaaaatcttctctct

SEQ ID NO: 155 - DNA, 18 bp, synthetic construct
  misc_feature 1..18: note = Synthetic oligonucleotide
  source 1..18: mol_type = other DNA
catcaaaatcttctctct

SEQ ID NO: 156 - DNA, 18 bp, synthetic construct
  misc_feature 1..18: note = Synthetic oligonucleotide
  source 1..18: mol_type = other DNA
tccacatcaaaatcttct

SEQ ID NO: 157 - DNA, 18 bp, synthetic construct
  misc_feature 1..18: note = Synthetic oligonucleotide
  source 1..18: mol_type = other DNA
gctccacatcaaaatctt

SEQ ID NO: 158 - DNA, 16 bp, synthetic construct
  misc_feature 1..16: note = Synthetic oligonucleotide
  source 1..16: mol_type = other DNA
gctccacatcaaaatc

SEQ ID NO: 159 - DNA, 16 bp, synthetic construct
  misc_feature 1..16: note = Synthetic oligonucleotide
  source 1..16: mol_type = other DNA
aacgcacagttaaact

SEQ ID NO: 160 - DNA, 17 bp, synthetic construct
  misc_feature 1..17: note = Synthetic oligonucleotide
  source 1..17: mol_type = other DNA
agctcattatctacaac

SEQ ID NO: 161 - DNA, 16 bp, synthetic construct
  misc_feature 1..16: note = Synthetic oligonucleotide
  source 1..16: mol_type = other DNA
gctcattatctacaac

SEQ ID NO: 162 - DNA, 17 bp, synthetic construct
  misc_feature 1..17: note = Synthetic oligonucleotide
  source 1..17: mol_type = other DNA
accaagctcattatcta

SEQ ID NO: 163 - DNA, 17 bp, synthetic construct
  misc_feature 1..17: note = Synthetic oligonucleotide
  source 1..17: mol_type = other DNA
aaccaagctcattatct

SEQ ID NO: 164 - DNA, 16 bp, synthetic construct
  misc_feature 1..16: note = Synthetic oligonucleotide
  source 1..16: mol_type = other DNA
gcctcagcaatctaaa

SEQ ID NO: 165 - DNA, 16 bp, synthetic construct
  misc_feature 1..16: note = Synthetic oligonucleotide
  source 1..16: mol_type = other DNA
cttacctatcatgctt

SEQ ID NO: 166 - DNA, 18 bp, synthetic construct
  misc_feature 1..18: note = Synthetic oligonucleotide
  source 1..18: mol_type = other DNA
tgctgaaatacaaaaata

SEQ ID NO: 167 - DNA, 16 bp, synthetic construct
  misc_feature 1..16: note = Synthetic oligonucleotide
  source 1..16: mol_type = other DNA
gatcactgtaattaca

SEQ ID NO: 168 - DNA, 16 bp, synthetic construct
  misc_feature 1..16: note = Synthetic oligonucleotide
  source 1..16: mol_type = other DNA
cagggaacccattacc

SEQ ID NO: 169 - DNA, 15 bp, synthetic construct
  misc_feature 1..15: note = Synthetic oligonucleotide
  source 1..15: mol_type = other DNA
cgaagcttccaaccc

SEQ ID NO: 170 - DNA, 16 bp, synthetic construct
  misc_feature 1..16: note = Synthetic oligonucleotide
  source 1..16: mol_type = other DNA
tactcacgatctccat

SEQ ID NO: 171 - DNA, 17 bp, synthetic construct
  misc_feature 1..17: note = Synthetic oligonucleotide
  source 1..17: mol_type = other DNA
ctacatgtccaaataat

SEQ ID NO: 172 - DNA, 17 bp, synthetic construct
  misc_feature 1..17: note = Synthetic oligonucleotide
  source 1..17: mol_type = other DNA
gtctaacattccaactt

SEQ ID NO: 173 - DNA, 18 bp, synthetic construct
  misc_feature 1..18: note = Synthetic oligonucleotide
  source 1..18: mol_type = other DNA
tgtctaacattccaactt

SEQ ID NO: 174 - DNA, 17 bp, synthetic construct
  misc_feature 1..17: note = Synthetic oligonucleotide
  source 1..17: mol_type = other DNA
ctaatgtctaacattcc

SEQ ID NO: 175 - DNA, 16 bp, synthetic construct
  misc_feature 1..16: note = Synthetic oligonucleotide
  source 1..16: mol_type = other DNA
taatgtctaacattcc

SEQ ID NO: 176 - DNA, 16 bp, synthetic construct
  misc_feature 1..16: note = Synthetic oligonucleotide
  source 1..16: mol_type = other DNA
ccacaaacgttccaaa

SEQ ID NO: 177 - DNA, 16 bp, synthetic construct
  misc_feature 1..16: note = Synthetic oligonucleotide
  source 1..16: mol_type = other DNA
cccacaaacgttccaa

SEQ ID NO: 178 - DNA, 16 bp, synthetic construct
  misc_feature 1..16: note = Synthetic oligonucleotide
  source 1..16: mol_type = other DNA
ctagcacactatccct

SEQ ID NO: 179 - DNA, 18 bp, synthetic construct
  misc_feature 1..18: note = Synthetic oligonucleotide
  source 1..18: mol_type = other DNA
gctataaatacaaactca

SEQ ID NO: 180 - DNA, 18 bp, synthetic construct
  misc_feature 1..18: note = Synthetic oligonucleotide
  source 1..18: mol_type = other DNA
tgctataaatacaaactc

SEQ ID NO: 181 - DNA, 18 bp, synthetic construct
  misc_feature 1..18: note = Synthetic oligonucleotide
  source 1..18: mol_type = other DNA
ttgctataaatacaaact

SEQ ID NO: 182 - DNA, 16 bp, synthetic construct
  misc_feature 1..16: note = Synthetic oligonucleotide
  source 1..16: mol_type = other DNA
gagttacaaacatact

SEQ ID NO: 183 - DNA, 16 bp, synthetic construct
  misc_feature 1..16: note = Synthetic oligonucleotide
  source 1..16: mol_type = other DNA
catcactccaagacat

SEQ ID NO: 184 - DNA, 17 bp, synthetic construct
  misc_feature 1..17: note = Synthetic oligonucleotide
  source 1..17: mol_type = other DNA
gatatctcactatacct

SEQ ID NO: 185 - DNA, 16 bp, synthetic construct
  misc_feature 1..16: note = Synthetic oligonucleotide
  source 1..16: mol_type = other DNA
agtgtaccaacccaca

SEQ ID NO: 186 - DNA, 17 bp, synthetic construct
  misc_feature 1..17: note = Synthetic oligonucleotide
  source 1..17: mol_type = other DNA
agacattctcacatttt

SEQ ID NO: 187 - DNA, 18 bp, synthetic construct
  misc_feature 1..18: note = Synthetic oligonucleotide
  source 1..18: mol_type = other DNA
tcagacattctcacattt

SEQ ID NO: 188 - DNA, 17 bp, synthetic construct
  misc_feature 1..17: note = Synthetic oligonucleotide
  source 1..17: mol_type = other DNA
tcagacattctcacatt

SEQ ID NO: 189 - DNA, 16 bp, synthetic construct
  misc_feature 1..16: note = Synthetic oligonucleotide
  source 1..16: mol_type = other DNA
cccaagctagtctatc

SEQ ID NO: 190 - DNA, 17 bp, synthetic construct
  misc_feature 1..17: note = Synthetic oligonucleotide
  source 1..17: mol_type = other DNA
attttgcatcattccca

SEQ ID NO: 191 - DNA, 17 bp, synthetic construct
  misc_feature 1..17: note = Synthetic oligonucleotide
  source 1..17: mol_type = other DNA
tgagattttactaaata

SEQ ID NO: 192 - DNA, 21 bp, synthetic construct
  misc_feature 1..21: note = Synthetic oligonucleotide
  source 1..21: mol_type = other DNA
tcttcaccacatctttaaaca

SEQ ID NO: 193 - DNA, 20 bp, synthetic construct
  misc_feature 1..20: note = Synthetic oligonucleotide
  source 1..20: mol_type = other DNA
tcttcaccacatctttaaac

SEQ ID NO: 194 - DNA, 16 bp, synthetic construct
  misc_feature 1..16: note = Synthetic oligonucleotide
  source 1..16: mol_type = other DNA
aggttatcttcaccac

SEQ ID NO: 195 - DNA, 16 bp, synthetic construct
  misc_feature 1..16: note = Synthetic oligonucleotide
  source 1..16: mol_type = other DNA
caaatccgtccacaca

SEQ ID NO: 196 - DNA, 21 bp, synthetic construct
  misc_feature 1..21: note = Synthetic oligonucleotide
  source 1..21: mol_type = other DNA
tttacctccacaacttcaaat

SEQ ID NO: 197 - DNA, 17 bp, synthetic construct
  misc_feature 1..17: note = Synthetic oligonucleotide
  source 1..17: mol_type = other DNA
acctccacaacttcaaa

SEQ ID NO: 198 - DNA, 16 bp, synthetic construct
  misc_feature 1..16: note = Synthetic oligonucleotide
  source 1..16: mol_type = other DNA
ggtactttacctccac

SEQ ID NO: 199 - DNA, 16 bp, synthetic construct
  misc_feature 1..16: note = Synthetic oligonucleotide
  source 1..16: mol_type = other DNA
tggtactttacctcca

SEQ ID NO: 200 - DNA, 16 bp, synthetic construct
  misc_feature 1..16: note = Synthetic oligonucleotide
  source 1..16: mol_type = other DNA
cctcttgtgctacaat

SEQ ID NO: 201 - DNA, 16 bp, synthetic construct
  misc_feature 1..16: note = Synthetic oligonucleotide
  source 1..16: mol_type = other DNA
taacccaatgtaccca

SEQ ID NO: 202 - DNA, 17 bp, synthetic construct
  misc_feature 1..17: note = Synthetic oligonucleotide
  source 1..17: mol_type = other DNA
ccttttcaaaagatact

SEQ ID NO: 203 - DNA, 19 bp, synthetic construct
  misc_feature 1..19: note = Synthetic oligonucleotide
  source 1..19: mol_type = other DNA
cagaaaaccaaatccaata

SEQ ID NO: 204 - DNA, 18 bp, synthetic construct
  misc_feature 1..18: note = Synthetic oligonucleotide
  source 1..18: mol_type = other DNA
atacagaaaaccaaatcc

SEQ ID NO: 205 - DNA, 20 bp, synthetic construct
  misc_feature 1..20: note = Synthetic oligonucleotide
  source 1..20: mol_type = other DNA
tatcaacattaatttaataa

SEQ ID NO: 206 - DNA, 19 bp, synthetic construct
  misc_feature 1..19: note = Synthetic oligonucleotide
  source 1..19: mol_type = other DNA
atcaacattaatttaataa

SEQ ID NO: 207 - DNA, 21 bp, synthetic construct
  misc_feature 1..21: note = Synthetic oligonucleotide
  source 1..21: mol_type = other DNA
acaaatatcaacattaattta

SEQ ID NO: 208 - DNA, 20 bp, synthetic construct
  misc_feature 1..20: note = Synthetic oligonucleotide
  source 1..20: mol_type = other DNA
caaatatcaacattaattta

SEQ ID NO: 209 - DNA, 15 bp, synthetic construct
  misc_feature 1..15: note = Synthetic oligonucleotide
  source 1..15: mol_type = other DNA
cctacgttgacattt

SEQ ID NO: 210 - DNA, 17 bp, synthetic construct
  misc_feature 1..17: note = Synthetic oligonucleotide
  source 1..17: mol_type = other DNA
attattccatccacctt

SEQ ID NO: 211 - DNA, 18 bp, synthetic construct
  misc_feature 1..18: note = Synthetic oligonucleotide
  source 1..18: mol_type = other DNA
tgattattccatccacct

SEQ ID NO: 212 - DNA, 17 bp, synthetic construct
  misc_feature 1..17: note = Synthetic oligonucleotide
  source 1..17: mol_type = other DNA
ttgattattccatccac

SEQ ID NO: 213 - DNA, 18 bp, synthetic construct
  misc_feature 1..18: note = Synthetic oligonucleotide
  source 1..18: mol_type = other DNA
gacagactccttcaaaaa

SEQ ID NO: 214 - DNA, 16 bp, synthetic construct
  misc_feature 1..16: note = Synthetic oligonucleotide
  source 1..16: mol_type = other DNA
attgcccgtttcttta

SEQ ID NO: 215 - DNA, 16 bp, synthetic construct
  misc_feature 1..16: note = Synthetic oligonucleotide
  source 1..16: mol_type = other DNA
ttgataacagatccca

SEQ ID NO: 216 - DNA, 18 bp, synthetic construct
  misc_feature 1..18: note = Synthetic oligonucleotide
  source 1..18: mol_type = other DNA
ctctaacacaattctcta

SEQ ID NO: 217 - DNA, 21 bp, synthetic construct
  misc_feature 1..21: note = Synthetic oligonucleotide
  source 1..21: mol_type = other DNA
cttctctaacacaattctcta

SEQ ID NO: 218 - DNA, 17 bp, synthetic construct
  misc_feature 1..17: note = Synthetic oligonucleotide
  source 1..17: mol_type = other DNA
tctctaacacaattctc

SEQ ID NO: 219 - DNA, 19 bp, synthetic construct
  misc_feature 1..19: note = Synthetic oligonucleotide
  source 1..19: mol_type = other DNA
agcaccttctctaacacaa

SEQ ID NO: 220 - DNA, 17 bp, synthetic construct
  misc_feature 1..17: note = Synthetic oligonucleotide
  source 1..17: mol_type = other DNA
gcaccttctctaacaca

SEQ ID NO: 221 - DNA, 18 bp, synthetic construct
  misc_feature 1..18: note = Synthetic oligonucleotide
  source 1..18: mol_type = other DNA
cagcaccttctctaacac

SEQ ID NO: 222 - DNA, 17 bp, synthetic construct
  misc_feature 1..17: note = Synthetic oligonucleotide
  source 1..17: mol_type = other DNA
cttgatgaatctctcaa

SEQ ID NO: 223 - DNA, 16 bp, synthetic construct
  misc_feature 1..16: note = Synthetic oligonucleotide
  source 1..16: mol_type = other DNA
acacccataatcaccc

SEQ ID NO: 224 - DNA, 18 bp, synthetic construct
  misc_feature 1..18: note = Synthetic oligonucleotide
  source 1..18: mol_type = other DNA
agccacacccataatcac

SEQ ID NO: 225 - DNA, 17 bp, synthetic construct
  misc_feature 1..17: note = Synthetic oligonucleotide
  source 1..17: mol_type = other DNA
catagccacacccataa

SEQ ID NO: 226 - DNA, 17 bp, synthetic construct
  misc_feature 1..17: note = Synthetic oligonucleotide
  source 1..17: mol_type = other DNA
aatagacagtcactccc

SEQ ID NO: 227 - DNA, 16 bp, synthetic construct
  misc_feature 1..16: note = Synthetic oligonucleotide
  source 1..16: mol_type = other DNA
tggaattccacaatac

SEQ ID NO: 228 - DNA, 15 bp, synthetic construct
  misc_feature 1..15: note = Synthetic oligonucleotide
  source 1..15: mol_type = other DNA
tttaccattcgcaat

SEQ ID NO: 229 - DNA, 15 bp, synthetic construct
  misc_feature 1..15: note = Synthetic oligonucleotide
  source 1..15: mol_type = other DNA
ctttaccattcgcaa

SEQ ID NO: 230 - DNA, 19 bp, synthetic construct
  misc_feature 1..19: note = Synthetic oligonucleotide
  source 1..19: mol_type = other DNA
ctcttcaactttaccattc

SEQ ID NO: 231 - DNA, 19 bp, synthetic construct
  misc_feature 1..19: note = Synthetic oligonucleotide
  source 1..19: mol_type = other DNA
gctcttcaactttaccatt

SEQ ID NO: 232 - DNA, 18 bp, synthetic construct
  misc_feature 1..18: note = Synthetic oligonucleotide
  source 1..18: mol_type = other DNA
ccaaacacactattctct

SEQ ID NO: 233 - DNA, 20 bp, synthetic construct
  misc_feature 1..20: note = Synthetic oligonucleotide
  source 1..20: mol_type = other DNA
taccaaacacactattctct

SEQ ID NO: 234 - DNA, 20 bp, synthetic construct
  misc_feature 1..20: note = Synthetic oligonucleotide
  source 1..20: mol_type = other DNA
gtaccaaacacactattctc

SEQ ID NO: 235 - DNA, 18 bp, synthetic construct
  misc_feature 1..18: note = Synthetic oligonucleotide
  source 1..18: mol_type = other DNA
acagtaccaaacacacta

SEQ ID NO: 236 - DNA, 17 bp, synthetic construct
  misc_feature 1..17: note = Synthetic oligonucleotide
  source 1..17: mol_type = other DNA
acagtaccaaacacact

SEQ ID NO: 237 - DNA, 16 bp, synthetic construct
  misc_feature 1..16: note = Synthetic oligonucleotide
  source 1..16: mol_type = other DNA
taatatggctcttcac

SEQ ID NO: 238 - DNA, 19 bp, synthetic construct
  misc_feature 1..19: note = Synthetic oligonucleotide
  source 1..19: mol_type = other DNA
aagaacctaccaccttctt

SEQ ID NO: 239 - DNA, 16 bp, synthetic construct
  misc_feature 1..16: note = Synthetic oligonucleotide
  source 1..16: mol_type = other DNA
gaacctaccaccttct

SEQ ID NO: 240 - DNA, 18 bp, synthetic construct
  misc_feature 1..18: note = Synthetic oligonucleotide
  source 1..18: mol_type = other DNA
aagaacctaccaccttct

SEQ ID NO: 241 - DNA, 18 bp, synthetic construct
  misc_feature 1..18: note = Synthetic oligonucleotide
  source 1..18: mol_type = other DNA
agtaaccacctccaaatc

SEQ ID NO: 242 - DNA, 17 bp, synthetic construct
  misc_feature 1..17: note = Synthetic oligonucleotide
  source 1..17: mol_type = other DNA
cagtaaccacctccaaa

SEQ ID NO: 243 - DNA, 16 bp, synthetic construct
  misc_feature 1..16: note = Synthetic oligonucleotide
  source 1..16: mol_type = other DNA
cagtaaccacctccaa

SEQ ID NO: 244 - DNA, 17 bp, synthetic construct
  misc_feature 1..17: note = Synthetic oligonucleotide
  source 1..17: mol_type = other DNA
atgacaatatcttctct

SEQ ID NO: 245 - DNA, 17 bp, synthetic construct
  misc_feature 1..17: note = Synthetic oligonucleotide
  source 1..17: mol_type = other DNA
catcccacaagacaact

SEQ ID NO: 246 - DNA, 16 bp, synthetic construct
  misc_feature 1..16: note = Synthetic oligonucleotide
  source 1..16: mol_type = other DNA
atcctgagtacaaacc

SEQ ID NO: 247 - DNA, 16 bp, synthetic construct
  misc_feature 1..16: note = Synthetic oligonucleotide
  source 1..16: mol_type = other DNA
ctattaaggaactcct

SEQ ID NO: 248 - DNA, 17 bp, synthetic construct
  misc_feature 1..17: note = Synthetic oligonucleotide
  source 1..17: mol_type = other DNA
ataactacatgaaatca

SEQ ID NO: 249 - DNA, 18 bp, synthetic construct
  misc_feature 1..18: note = Synthetic oligonucleotide
  source 1..18: mol_type = other DNA
attacaaacctccaccac

SEQ ID NO: 250 - DNA, 17 bp, synthetic construct
  misc_feature 1..17: note = Synthetic oligonucleotide
  source 1..17: mol_type = other DNA
gattacaaacctccacc

SEQ ID NO: 251 - DNA, 16 bp, synthetic construct
  misc_feature 1..16: note = Synthetic oligonucleotide
  source 1..16: mol_type = other DNA
aggattacaaacctcc

SEQ ID NO: 252 - DNA, 21 bp, synthetic construct
  misc_feature 1..21: note = Synthetic oligonucleotide
  source 1..21: mol_type = other DNA
aacaattcctaccctatcttt

SEQ ID NO: 253 - DNA, 20 bp, synthetic construct
  misc_feature 1..20: note = Synthetic oligonucleotide
  source 1..20: mol_type = other DNA
aacaattcctaccctatctt

SEQ ID NO: 254 - DNA, 17 bp, synthetic construct
  misc_feature 1..17: note = Synthetic oligonucleotide
  source 1..17: mol_type = other DNA
ttcaacaattcctaccc

SEQ ID NO: 255 - DNA, 18 bp, synthetic construct
  misc_feature 1..18: note = Synthetic oligonucleotide
  source 1..18: mol_type = other DNA
ccttcaacaattcctacc

SEQ ID NO: 256 - DNA, 18 bp, synthetic construct
  misc_feature 1..18: note = Synthetic oligonucleotide
  source 1..18: mol_type = other DNA
gctcaccttcaacaattc

SEQ ID NO: 257 - DNA, 17 bp, synthetic construct
  misc_feature 1..17: note = Synthetic oligonucleotide
  source 1..17: mol_type = other DNA
gctcaccttcaacaatt

SEQ ID NO: 258 - DNA, 16 bp, synthetic construct
  misc_feature 1..16: note = Synthetic oligonucleotide
  source 1..16: mol_type = other DNA
gctcaccttcaacaat

SEQ ID NO: 259 - DNA, 17 bp, synthetic construct
  misc_feature 1..17: note = Synthetic oligonucleotide
  source 1..17: mol_type = other DNA
tccatctcaaaaagact

SEQ ID NO: 260 - DNA, 15 bp, synthetic construct
  misc_feature 1..15: note = Synthetic oligonucleotide
  source 1..15: mol_type = other DNA
aaggccgccttaaac

SEQ ID NO: 261 - DNA, 16 bp, synthetic construct
  misc_feature 1..16: note = Synthetic oligonucleotide
  source 1..16: mol_type = other DNA
ctatgtaagcccaaca

SEQ ID NO: 262 - DNA, 17 bp, synthetic construct
  misc_feature 1..17: note = Synthetic oligonucleotide
  source 1..17: mol_type = other DNA
ttccccctttattcaaa

SEQ ID NO: 263 - DNA, 17 bp, synthetic construct
  misc_feature 1..17: note = Synthetic oligonucleotide
  source 1..17: mol_type = other DNA
cttccccctttattcaa

SEQ ID NO: 264 - DNA, 16 bp, synthetic construct
  misc_feature 1..16: note = Synthetic oligonucleotide
  source 1..16: mol_type = other DNA
acattccgcacatctc

SEQ ID NO: 265 - DNA, 15 bp, synthetic construct
  misc_feature 1..15: note = Synthetic oligonucleotide
  source 1..15: mol_type = other DNA
tatcacattccgcac

SEQ ID NO: 266 - DNA, 16 bp, synthetic construct
  misc_feature 1..16: note = Synthetic oligonucleotide
  source 1..16: mol_type = other DNA
gaacatatcacattcc

SEQ ID NO: 267 - DNA, 16 bp, synthetic construct
  misc_feature 1..16: note = Synthetic oligonucleotide
  source 1..16: mol_type = other DNA
tcccctagaataatac

SEQ ID NO: 268 - DNA, 16 bp, synthetic construct
  misc_feature 1..16: note = Synthetic oligonucleotide
  source 1..16: mol_type = other DNA
actcccctagaataat

SEQ ID NO: 269 - DNA, 15 bp, synthetic construct
  misc_feature 1..15: note = Synthetic oligonucleotide
  source 1..15: mol_type = other DNA
atcgatactccccta

SEQ ID NO: 270 - DNA, 15 bp, synthetic construct
  misc_feature 1..15: note = Synthetic oligonucleotide
  source 1..15: mol_type = other DNA
acatcgatactcccc

SEQ ID NO: 271 - DNA, 18 bp, synthetic construct
  misc_feature 1..18: note = Synthetic oligonucleotide
  source 1..18: mol_type = other DNA
tttacccatctcccattt

SEQ ID NO: 272 - DNA, 17 bp, synthetic construct
  misc_feature 1..17: note = Synthetic oligonucleotide
  source 1..17: mol_type = other DNA
atttacccatctcccat

SEQ ID NO: 273 - DNA, 16 bp, synthetic construct
  misc_feature 1..16: note = Synthetic oligonucleotide
  source 1..16: mol_type = other DNA
ggaagctcaataccca

SEQ ID NO: 274 - DNA, 17 bp, synthetic construct
  misc_feature 1..17: note = Synthetic oligonucleotide
  source 1..17: mol_type = other DNA
gtttctacccacaccac

SEQ ID NO: 275 - DNA, 17 bp, synthetic construct
  misc_feature 1..17: note = Synthetic oligonucleotide
  source 1..17: mol_type = other DNA
tacagtttctacccaca

SEQ ID NO: 276 - DNA, 17 bp, synthetic construct
  misc_feature 1..17: note = Synthetic oligonucleotide
  source 1..17: mol_type = other DNA
ctacagtttctacccac

SEQ ID NO: 277 - DNA, 17 bp, synthetic construct
  misc_feature 1..17: note = Synthetic oligonucleotide
  source 1..17: mol_type = other DNA
gtaacagctaatttcat

SEQ ID NO: 278 - DNA, 17 bp, synthetic construct
  misc_feature 1..17: note = Synthetic oligonucleotide
  source 1..17: mol_type = other DNA
agttcctatcacttcac

SEQ ID NO: 279 - DNA, 18 bp, synthetic construct
  misc_feature 1..18: note = Synthetic oligonucleotide
  source 1..18: mol_type = other DNA
atcctttctcagaatcca

SEQ ID NO: 280 - DNA, 17 bp, synthetic construct
  misc_feature 1..17: note = Synthetic oligonucleotide
  source 1..17: mol_type = other DNA
attggtctcacaactca

SEQ ID NO: 281 - DNA, 17 bp, synthetic construct
  misc_feature 1..17: note = Synthetic oligonucleotide
  source 1..17: mol_type = other DNA
acccaactagatccaat

SEQ ID NO: 282 - DNA, 16 bp, synthetic construct
  misc_feature 1..16: note = Synthetic oligonucleotide
  source 1..16: mol_type = other DNA
ataattcatgcttaac

SEQ ID NO: 283 - DNA, 17 bp, synthetic construct
  misc_feature 1..17: note = Synthetic oligonucleotide
  source 1..17: mol_type = other DNA
atgaatgactaaatcta

SEQ ID NO: 284 - DNA, 18 bp, synthetic construct
  misc_feature 1..18: note = Synthetic oligonucleotide
  source 1..18: mol_type = other DNA
cacatctgacttttcctc

SEQ ID NO: 285 - DNA, 16 bp, synthetic construct
  misc_feature 1..16: note = Synthetic oligonucleotide
  source 1..16: mol_type = other DNA
tagtcaactacctcca

SEQ ID NO: 286 - DNA, 16 bp, synthetic construct
  misc_feature 1..16: note = Synthetic oligonucleotide
  source 1..16: mol_type = other DNA
ttagtcaactacctcc

SEQ ID NO: 287 - DNA, 16 bp, synthetic construct
  misc_feature 1..16: note = Synthetic oligonucleotide
  source 1..16: mol_type = other DNA
tcagcatgtcttaatc

SEQ ID NO: 288 - DNA, 17 bp, synthetic construct
  misc_feature 1..17: note = Synthetic oligonucleotide
  source 1..17: mol_type = other DNA
caaatgttctacccaat

SEQ ID NO: 289 - DNA, 17 bp, synthetic construct
  misc_feature 1..17: note = Synthetic oligonucleotide
  source 1..17: mol_type = other DNA
tcaaatgttctacccaa

SEQ ID NO: 290 - DNA, 18 bp, synthetic construct
  misc_feature 1..18: note = Synthetic oligonucleotide
  source 1..18: mol_type = other DNA
ggaaaattttcaatcttt

SEQ ID NO: 291 - DNA, 17 bp, synthetic construct
  misc_feature 1..17: note = Synthetic oligonucleotide
  source 1..17: mol_type = other DNA
ccagtactcattaataa

SEQ ID NO: 292 - DNA, 17 bp, synthetic construct
  misc_feature 1..17: note = Synthetic oligonucleotide
  source 1..17: mol_type = other DNA
acccagtactcattaat

SEQ ID NO: 293 - DNA, 16 bp, synthetic construct
  misc_feature 1..16: note = Synthetic oligonucleotide
  source 1..16: mol_type = other DNA
cacccagtactcatta

SEQ ID NO: 294 - DNA, 15 bp, synthetic construct
  misc_feature 1..15: note = Synthetic oligonucleotide
  source 1..15: mol_type = other DNA
ggtcccgacatacat

SEQ ID NO: 295 - DNA, 18 bp, synthetic construct
  misc_feature 1..18: note = Synthetic oligonucleotide
  source 1..18: mol_type = other DNA
ataacaaagactttcttt

SEQ ID NO: 296 - DNA, 16 bp, synthetic construct
  misc_feature 1..16: note = Synthetic oligonucleotide
  source 1..16: mol_type = other DNA
ccatactcccacatct

SEQ ID NO: 297 - DNA, 16 bp, synthetic construct
  misc_feature 1..16: note = Synthetic oligonucleotide
  source 1..16: mol_type = other DNA
ttcagcattaaccata

SEQ ID NO: 298 - DNA, 16 bp, synthetic construct
  misc_feature 1..16: note = Synthetic oligonucleotide
  source 1..16: mol_type = other DNA
agactctttgacaatc

SEQ ID NO: 299 - DNA, 16 bp, synthetic construct
  misc_feature 1..16: note = Synthetic oligonucleotide
  source 1..16: mol_type = other DNA
ctcagtgatcaaccct

SEQ ID NO: 300 - DNA, 16 bp, synthetic construct
  misc_feature 1..16: note = Synthetic oligonucleotide
  source 1..16: mol_type = other DNA
agtaactgaataacca

SEQ ID NO: 301 - DNA, 17 bp, synthetic construct
  misc_feature 1..17: note = Synthetic oligonucleotide
  source 1..17: mol_type = other DNA
ttgctgtaaattattca

SEQ ID NO: 302 - DNA, 18 bp, synthetic construct
  misc_feature 1..18: note = Synthetic oligonucleotide
  source 1..18: mol_type = other DNA
tagtcatttctaacttct

SEQ ID NO: 303 - DNA, 16 bp, synthetic construct
  misc_feature 1..16: note = Synthetic oligonucleotide
  source 1..16: mol_type = other DNA
attgaagcaactcaca

SEQ ID NO: 304 - DNA, 19 bp, synthetic construct
  misc_feature 1..19: note = Synthetic oligonucleotide
  source 1..19: mol_type = other DNA
tacaagaaaattaatttct

SEQ ID NO: 305 - DNA, 16 bp, synthetic construct
  misc_feature 1..16: note = Synthetic oligonucleotide
  source 1..16: mol_type = other DNA
actaagtcattacact

SEQ ID NO: 306 - DNA, 18 bp, synthetic construct
  misc_feature 1..18: note = Synthetic oligonucleotide
  source 1..18: mol_type = other DNA
aatgttcaatttctattt

SEQ ID NO: 307 - DNA, 16 bp, synthetic construct
  source 1..16: mol_type = other DNA
  modified_base 1: mod_base = OTHER; note = beta-D-oxy locked nucleotide with phosphorothioate linkage
  modified_base 2: mod_base = OTHER; note = beta-D-oxy locked nucleotide with phosphorothioate linkage
  modified_base 3: mod_base = OTHER; note = beta-D-oxy locked nucleotide with phosphorothioate linkage
  modified_base 4: mod_base = OTHER; note = beta-D-oxy locked nucleotide with phosphorothioate linkage
  modified_base 5: mod_base = OTHER; note = Nucleotide with phosphorothioate linkage
  modified_base 6: mod_base = OTHER; note = Nucleotide with phosphorothioate linkage
  modified_base 7: mod_base = OTHER; note = Nucleotide with phosphorothioate linkage
  modified_base 8: mod_base = OTHER; note = Nucleotide with phosphorothioate linkage
  modified_base 9: mod_base = OTHER; note = Nucleotide with phosphorothioate linkage
  modified_base 10: mod_base = OTHER; note = Nucleotide with phosphorothioate linkage
  modified_base 11: mod_base = OTHER; note = Nucleotide with phosphorothioate linkage
  modified_base 12: mod_base = OTHER; note = Nucleotide with phosphorothioate linkage
  modified_base 13: mod_base = OTHER; note = beta-D-oxy locked nucleotide with phosphorothioate linkage
  modified_base 14: mod_base = OTHER; note = beta-D-oxy locked nucleotide with phosphorothioate linkage
  modified_base 15: mod_base = OTHER; note = 5-methyl beta-D-oxy locked nucleotide with phosphorothioate linkage
  modified_base 16: mod_base = OTHER; note = beta-D-oxy locked nucleotide with phosphorothioate linkage
aaagttgttaccttca

SEQ ID NO: 308 - DNA, 18 bp, synthetic construct
  source 1..18: mol_type = other DNA
  modified_base 1: mod_base = OTHER; note = 5-methyl beta-D-oxy locked nucleotide with phosphorothioate linkage
  modified_base 2: mod_base = OTHER; note = beta-D-oxy locked nucleotide with phosphorothioate linkage
  modified_base 3: mod_base = OTHER; note = Nucleotide with phosphorothioate linkage
  modified_base 4: mod_base = OTHER; note = Nucleotide with phosphorothioate linkage
  modified_base 5: mod_base = OTHER; note = Nucleotide with phosphorothioate linkage
  modified_base 6: mod_base = OTHER; note = Nucleotide with phosphorothioate linkage
  modified_base 7: mod_base = OTHER; note = Nucleotide with phosphorothioate linkage
  modified_base 8: mod_base = OTHER; note = Nucleotide with phosphorothioate linkage
  modified_base 9: mod_base = OTHER; note = Nucleotide with phosphorothioate linkage
  modified_base 10: mod_base = OTHER; note = Nucleotide with phosphorothioate linkage
  modified_base 11: mod_base = OTHER; note = Nucleotide with phosphorothioate linkage
  modified_base 12: mod_base = OTHER; note = Nucleotide with phosphorothioate linkage
  modified_base 13: mod_base = OTHER; note = Nucleotide with phosphorothioate linkage
  modified_base 14: mod_base = OTHER; note = Nucleotide with phosphorothioate linkage
  modified_base 15: mod_base = OTHER; note = beta-D-oxy locked nucleotide with phosphorothioate linkage
  modified_base 16: mod_base = OTHER; note = beta-D-oxy locked nucleotide with phosphorothioate linkage
  modified_base 17: mod_base = OTHER; note = beta-D-oxy locked nucleotide with phosphorothioate linkage
  modified_base 18: mod_base = OTHER; note = beta-D-oxy locked nucleotide with phosphorothioate linkage
caaagcttctctctttaa

SEQ ID NO: 309 - DNA, 17 bp, synthetic construct
  source 1..17: mol_type = other DNA
  modified_base 1: mod_base = OTHER; note = beta-D-oxy locked nucleotide with phosphorothioate linkage
  modified_base 2: mod_base = OTHER; note = beta-D-oxy locked nucleotide with phosphorothioate linkage
  modified_base 3: mod_base = OTHER; note = 5-methyl beta-D-oxy locked nucleotide with phosphorothioate linkage
  modified_base 4: mod_base = OTHER; note = Nucleotide with phosphorothioate linkage
  modified_base 5: mod_base = OTHER; note = Nucleotide with phosphorothioate linkage
  modified_base 6: mod_base = OTHER; note = Nucleotide with phosphorothioate linkage
  modified_base 7: mod_base = OTHER; note = Nucleotide with phosphorothioate linkage
  modified_base 8: mod_base = OTHER; note = Nucleotide with phosphorothioate linkage
  modified_base 9: mod_base = OTHER; note = Nucleotide with phosphorothioate linkage
  modified_base 10: mod_base = OTHER; note = Nucleotide with phosphorothioate linkage
  modified_base 11: mod_base = OTHER; note = Nucleotide with phosphorothioate linkage
  modified_base 12: mod_base = OTHER; note = Nucleotide with phosphorothioate linkage
  modified_base 13: mod_base = OTHER; note = Nucleotide with phosphorothioate linkage
  modified_base 14: mod_base = OTHER; note = Nucleotide with phosphorothioate linkage
  modified_base 15: mod_base = OTHER; note = 5-methyl beta-D-oxy locked nucleotide with phosphorothioate linkage
  modified_base 16: mod_base = OTHER; note = beta-D-oxy locked nucleotide with phosphorothioate linkage
  modified_base 17: mod_base = OTHER; note = beta-D-oxy locked nucleotide with phosphorothioate linkage
ttccttcatcaaagctt

SEQ ID NO: 310 - DNA, 17 bp, synthetic construct
  source 1..17: mol_type = other DNA
  modified_base 1: mod_base = OTHER; note = 5-methyl beta-D-oxy locked nucleotide with phosphorothioate linkage
  modified_base 2: mod_base = OTHER; note = beta-D-oxy locked nucleotide with phosphorothioate linkage
  modified_base 3: mod_base = OTHER; note = Nucleotide with phosphorothioate linkage
  modified_base 4: mod_base = OTHER; note = Nucleotide with phosphorothioate linkage
  modified_base 5: mod_base = OTHER; note = Nucleotide with phosphorothioate linkage
  modified_base 6: mod_base = OTHER; note = Nucleotide with phosphorothioate linkage
  modified_base 7: mod_base = OTHER; note = Nucleotide with phosphorothioate linkage
  modified_base 8: mod_base = OTHER; note = Nucleotide with phosphorothioate linkage
  modified_base 9: mod_base = OTHER; note = Nucleotide with phosphorothioate linkage
  modified_base 10: mod_base = OTHER; note = Nucleotide with phosphorothioate linkage
  modified_base 11: mod_base = OTHER; note = Nucleotide with phosphorothioate linkage
  modified_base 12: mod_base = OTHER; note = Nucleotide with phosphorothioate linkage
  modified_base 13: mod_base = OTHER; note = Nucleotide with phosphorothioate linkage
  modified_base 14: mod_base = OTHER; note = Nucleotide with phosphorothioate linkage
  modified_base 15: mod_base = OTHER; note = 5-methyl beta-D-oxy locked nucleotide with phosphorothioate linkage
  modified_base 16: mod_base = OTHER; note = beta-D-oxy locked nucleotide with phosphorothioate linkage
  modified_base 17: mod_base = OTHER; note = 5-methyl beta-D-oxy locked nucleotide with phosphorothioate linkage
ctttcacaaattgcctc

SEQ ID NO: 311 - DNA, 16 bp, synthetic construct
  source 1..16: mol_type = other DNA
  modified_base 1: mod_base = OTHER; note = beta-D-oxy locked nucleotide with phosphorothioate linkage
  modified_base 2: mod_base = OTHER; note = beta-D-oxy locked nucleotide with phosphorothioate linkage
  modified_base 3: mod_base = OTHER; note = beta-D-oxy locked nucleotide with phosphorothioate linkage
  modified_base 4: mod_base = OTHER; note = Nucleotide with phosphorothioate linkage
  modified_base 5: mod_base = OTHER; note = Nucleotide with phosphorothioate linkage
  modified_base 6: mod_base = OTHER; note = Nucleotide with phosphorothioate linkage
  modified_base 7: mod_base = OTHER; note = Nucleotide with phosphorothioate linkage
  modified_base 8: mod_base = OTHER; note = Nucleotide with phosphorothioate linkage
  modified_base 9: mod_base = OTHER; note = Nucleotide with phosphorothioate linkage
  modified_base 10: mod_base = OTHER; note = Nucleotide with phosphorothioate linkage
  modified_base 11: mod_base = OTHER; note = Nucleotide with phosphorothioate linkage
  modified_base 12: mod_base = OTHER; note = Nucleotide with phosphorothioate linkage
  modified_base 13: mod_base = OTHER; note = Nucleotide with phosphorothioate linkage
  modified_base 14: mod_base = OTHER; note = Nucleotide with phosphorothioate linkage
  modified_base 15: mod_base = OTHER; note = beta-D-oxy locked nucleotide with phosphorothioate linkage
  modified_base 16: mod_base = OTHER; note = beta-D-oxy locked nucleotide with phosphorothioate linkage
aaggtatcttcccata

SEQ ID NO: 312 - DNA, 16 bp, synthetic construct
  source 1..16: mol_type = other DNA
  modified_base 1: mod_base = OTHER; note = 5-methyl beta-D-oxy locked nucleotide with phosphorothioate linkage
  modified_base 2: mod_base = OTHER; note = 5-methyl beta-D-oxy locked nucleotide with phosphorothioate linkage
  modified_base 3: mod_base = OTHER; note = Nucleotide with phosphorothioate linkage
  modified_base 4: mod_base = OTHER; note = Nucleotide with phosphorothioate linkage
  modified_base 5: mod_base = OTHER; note = Nucleotide with phosphorothioate linkage
  modified_base 6: mod_base = OTHER; note = Nucleotide with phosphorothioate linkage
  modified_base 7: mod_base = OTHER; note = Nucleotide with phosphorothioate linkage
  modified_base 8: mod_base = OTHER; note = Nucleotide with phosphorothioate linkage
  modified_base 9: mod_base = OTHER; note = Nucleotide with phosphorothioate linkage
  modified_base 10: mod_base = OTHER; note = Nucleotide with phosphorothioate linkage
  modified_base 11: mod_base = OTHER; note = Nucleotide with phosphorothioate linkage
  modified_base 12: mod_base = OTHER; note = Nucleotide with phosphorothioate linkage
  modified_base 13: mod_base = OTHER; note = Nucleotide with phosphorothioate linkage
  modified_base 14: mod_base = OTHER; note = Nucleotide with phosphorothioate linkage
  modified_base 15: mod_base = OTHER; note = beta-D-oxy locked nucleotide with phosphorothioate linkage
  modified_base 16: mod_base = OTHER; note = beta-D-oxy locked nucleotide with phosphorothioate linkage
cccttacttttctcga

SEQ ID NO: 313 - DNA, 17 bp, synthetic construct
  source 1..17: mol_type = other DNA
  modified_base 1: mod_base = OTHER; note = beta-D-oxy locked nucleotide with phosphorothioate linkage
  modified_base 2: mod_base = OTHER; note = beta-D-oxy locked nucleotide with phosphorothioate linkage
  modified_base 3: mod_base = OTHER; note = Nucleotide with phosphorothioate linkage
  modified_base 4: mod_base = OTHER; note = Nucleotide with phosphorothioate linkage
  modified_base 5: mod_base = OTHER; note = Nucleotide with phosphorothioate linkage
  modified_base 6: mod_base = OTHER; note = Nucleotide with phosphorothioate linkage
  modified_base 7: mod_base = OTHER; note = Nucleotide with phosphorothioate linkage
  modified_base 8: mod_base = OTHER; note = Nucleotide with phosphorothioate linkage
  modified_base 9: mod_base = OTHER; note = Nucleotide with phosphorothioate linkage
  modified_base 10: mod_base = OTHER; note = Nucleotide with phosphorothioate linkage
  modified_base 11: mod_base = OTHER; note = Nucleotide with phosphorothioate linkage
  modified_base 12: mod_base = OTHER; note = Nucleotide with phosphorothioate linkage
  modified_base 13: mod_base = OTHER; note = Nucleotide with phosphorothioate linkage
  modified_base 14: mod_base = OTHER; note = Nucleotide with phosphorothioate linkage
  modified_base 15: mod_base = OTHER; note = beta-D-oxy locked nucleotide with phosphorothioate linkage
  modified_base 16: mod_base = OTHER; note = beta-D-oxy locked nucleotide with phosphorothioate linkage
  modified_base 17: mod_base = OTHER; note = beta-D-oxy locked nucleotide with phosphorothioate linkage
agatatgctttccctta

SEQ ID NO: 314 - DNA, 16 bp, synthetic construct
  source 1..16: mol_type = other DNA
  modified_base 1: mod_base = OTHER; note = beta-D-oxy locked nucleotide with phosphorothioate linkage
  modified_base 2: mod_base = OTHER; note = beta-D-oxy locked nucleotide with phosphorothioate linkage
  modified_base 3: mod_base = OTHER; note = beta-D-oxy locked nucleotide with phosphorothioate linkage
  modified_base 4: mod_base = OTHER; note = beta-D-oxy locked nucleotide with phosphorothioate linkage
  modified_base 5: mod_base = OTHER; note = Nucleotide with phosphorothioate linkage
  modified_base 6: mod_base = OTHER; note = Nucleotide with phosphorothioate linkage
  modified_base 7: mod_base = OTHER; note = Nucleotide with phosphorothioate linkage
  modified_base 8: mod_base = OTHER; note = Nucleotide with phosphorothioate linkage
  modified_base 9: mod_base = OTHER; note = Nucleotide with phosphorothioate linkage
  modified_base 10: mod_base = OTHER; note = Nucleotide with phosphorothioate linkage
  modified_base 11: mod_base = OTHER; note = Nucleotide with phosphorothioate linkage
  modified_base 12: mod_base = OTHER; note = Nucleotide with phosphorothioate linkage
  modified_base 13: mod_base = OTHER; note = beta-D-oxy locked nucleotide with phosphorothioate linkage
  modified_base 14: mod_base = OTHER; note = beta-D-oxy locked nucleotide with phosphorothioate linkage
  modified_base 15: mod_base = OTHER; note = 5-methyl beta-D-oxy locked nucleotide with phosphorothioate linkage
  modified_base 16: mod_base = OTHER; note = beta-D-oxy locked nucleotide with phosphorothioate linkage
ttgacaagctattaca

SEQ ID NO: 315 - DNA, 17 bp, synthetic construct
  source 1..17: mol_type = other DNA
  modified_base 1: mod_base = OTHER; note = 5-methyl beta-D-oxy locked nucleotide with phosphorothioate linkage
  modified_base 2: mod_base = OTHER; note = 5-methyl beta-D-oxy locked nucleotide with phosphorothioate linkage
  modified_base 3: mod_base = OTHER; note = beta-D-oxy locked nucleotide with phosphorothioate linkage
  modified_base 4: mod_base = OTHER; note = Nucleotide with phosphorothioate linkage
  modified_base 5: mod_base = OTHER; note = Nucleotide with phosphorothioate linkage
  modified_base 6: mod_base = OTHER; note = Nucleotide with phosphorothioate linkage
  modified_base 7: mod_base = OTHER; note = Nucleotide with phosphorothioate linkage
  modified_base 8: mod_base = OTHER; note = Nucleotide with phosphorothioate linkage
  modified_base 9: mod_base = OTHER; note = Nucleotide with phosphorothioate linkage
  modified_base 10: mod_base = OTHER; note = Nucleotide with phosphorothioate linkage
  modified_base 11: mod_base = OTHER; note = Nucleotide with phosphorothioate linkage
  modified_base 12: mod_base = OTHER; note = Nucleotide with phosphorothioate linkage
  modified_base 13: mod_base = OTHER; note = Nucleotide with phosphorothioate linkage
  modified_base 14: mod_base = OTHER; note = beta-D-oxy locked nucleotide with phosphorothioate linkage
  modified_base 15: mod_base = OTHER; note = beta-D-oxy locked nucleotide with phosphorothioate linkage
  modified_base 16: mod_base = OTHER; note = beta-D-oxy locked nucleotide with phosphorothioate linkage
  modified_base 17: mod_base = OTHER; note = beta-D-oxy locked nucleotide with phosphorothioate linkage
ccaatattcctacaatt

SEQ ID NO: 316 - DNA, 16 bp, synthetic construct
  source 1..16: mol_type = other DNA
  modified_base 1: mod_base = OTHER; note = 5-methyl beta-D-oxy locked nucleotide with phosphorothioate linkage
  modified_base 2: mod_base = OTHER; note = 5-methyl beta-D-oxy locked nucleotide with phosphorothioate linkage
  modified_base 3: mod_base = OTHER; note = Nucleotide with phosphorothioate linkage
  modified_base 4: mod_base = OTHER; note = Nucleotide with phosphorothioate linkage
  modified_base 5: mod_base = OTHER; note = Nucleotide with phosphorothioate linkage
  modified_base 6: mod_base = OTHER; note = Nucleotide with phosphorothioate linkage
  modified_base 7: mod_base = OTHER; note = Nucleotide with phosphorothioate linkage
  modified_base 8: mod_base = OTHER; note = Nucleotide with phosphorothioate linkage
  modified_base 9: mod_base = OTHER; note = Nucleotide with phosphorothioate linkage
  modified_base 10: mod_base = OTHER; note = Nucleotide with phosphorothioate linkage
  modified_base 11: mod_base = OTHER; note = Nucleotide with phosphorothioate linkage
  modified_base 12: mod_base = OTHER; note = Nucleotide with phosphorothioate linkage
  modified_base 13: mod_base = OTHER; note = Nucleotide with phosphorothioate linkage
  modified_base 14: mod_base = OTHER; note = Nucleotide with phosphorothioate linkage
  modified_base 15: mod_base = OTHER; note = beta-D-oxy locked nucleotide with phosphorothioate linkage
  modified_base 16: mod_base = OTHER; note = 5-methyl beta-D-oxy locked nucleotide with phosphorothioate linkage
ccagccctcaattaac

SEQ ID NO: 317 - DNA, 16 bp, synthetic construct
  source 1..16: mol_type = other DNA
  modified_base 1: mod_base = OTHER; note = beta-D-oxy locked nucleotide with phosphorothioate linkage
  modified_base 2: mod_base = OTHER; note = beta-D-oxy locked nucleotide with phosphorothioate linkage
  modified_base 3: mod_base = OTHER; note = beta-D-oxy locked nucleotide with phosphorothioate linkage
  modified_base 4: mod_base = OTHER; note = beta-D-oxy locked nucleotide with phosphorothioate linkage
  modified_base 5: mod_base = OTHER; note = Nucleotide with phosphorothioate linkage
  modified_base 6: mod_base = OTHER; note = Nucleotide with phosphorothioate linkage
  modified_base 7: mod_base = OTHER; note = Nucleotide with phosphorothioate linkage
  modified_base 8: mod_base = OTHER; note = Nucleotide with phosphorothioate linkage
  modified_base 9: mod_base = OTHER; note = Nucleotide with phosphorothioate linkage
  modified_base 10: mod_base = OTHER; note = Nucleotide with phosphorothioate linkage
  modified_base 11: mod_base = OTHER; note = Nucleotide with phosphorothioate linkage
  modified_base 12: mod_base = OTHER; note = Nucleotide with phosphorothioate linkage
  modified_base 13: mod_base = OTHER; note = 5-methyl beta-D-oxy locked nucleotide with phosphorothioate linkage
  modified_base 14: mod_base = OTHER; note = beta-D-oxy locked nucleotide with phosphorothioate linkage
  modified_base 15: mod_base = OTHER; note = beta-D-oxy locked nucleotide with phosphorothioate linkage
  modified_base 16: mod_base = OTHER; note = 5-methyl beta-D-oxy locked nucleotide with phosphorothioate linkage
gatttagactaacttc

SEQ ID NO: 318 - DNA, 17 bp, synthetic construct
  source 1..17: mol_type = other DNA
  modified_base 1: mod_base = OTHER; note = beta-D-oxy locked nucleotide with phosphorothioate linkage
  modified_base 2: mod_base = OTHER; note = beta-D-oxy locked nucleotide with phosphorothioate linkage
  modified_base 3: mod_base = OTHER; note = Nucleotide with phosphorothioate linkage
  modified_base 4: mod_base = OTHER; note = Nucleotide with phosphorothioate linkage
  modified_base 5: mod_base = OTHER; note = Nucleotide with phosphorothioate linkage
  modified_base 6: mod_base = OTHER; note = Nucleotide with phosphorothioate linkage
  modified_base 7: mod_base = OTHER; note = Nucleotide with phosphorothioate linkage
  modified_base 8: mod_base = OTHER; note = Nucleotide with phosphorothioate linkage
  modified_base 9: mod_base = OTHER; note = Nucleotide with phosphorothioate linkage
  modified_base 10: mod_base = OTHER; note = Nucleotide with phosphorothioate linkage
  modified_base 11: mod_base = OTHER; note = Nucleotide with phosphorothioate linkage
  modified_base 12: mod_base = OTHER; note = Nucleotide with phosphorothioate linkage
  modified_base 13: mod_base = OTHER; note = Nucleotide with phosphorothioate linkage
  modified_base 14: mod_base = OTHER; note = Nucleotide with phosphorothioate linkage
  modified_base 15: mod_base = OTHER; note = Nucleotide with phosphorothioate linkage
  modified_base 16: mod_base = OTHER; note = beta-D-oxy locked nucleotide with phosphorothioate linkage
  modified_base 17: mod_base = OTHER; note = 5-methyl beta-D-oxy locked nucleotide with phosphorothioate linkage
gataccatgacaccctc

SEQ ID NO: 319 - DNA, 18 bp, synthetic construct
  source 1..18: mol_type = other DNA
  modified_base 1: mod_base = OTHER; note = 5-methyl beta-D-oxy locked nucleotide with phosphorothioate linkage
  modified_base 2: mod_base = OTHER; note = beta-D-oxy locked nucleotide with phosphorothioate linkage
  modified_base 3: mod_base = OTHER; note = beta-D-oxy locked nucleotide with phosphorothioate linkage
  modified_base 4: mod_base = OTHER; note = beta-D-oxy locked nucleotide with phosphorothioate linkage
  modified_base 5: mod_base = OTHER; note = Nucleotide with phosphorothioate linkage
  modified_base 6: mod_base = OTHER; note = Nucleotide with phosphorothioate linkage
  modified_base 7: mod_base = OTHER; note = Nucleotide with phosphorothioate linkage
  modified_base 8: mod_base = OTHER; note = Nucleotide with phosphorothioate linkage
  modified_base 9: mod_base = OTHER; note = Nucleotide with phosphorothioate linkage
  modified_base 10: mod_base = OTHER; note = Nucleotide with phosphorothioate linkage
  modified_base 11: mod_base = OTHER; note = Nucleotide with phosphorothioate linkage
  modified_base 12: mod_base = OTHER; note = Nucleotide with phosphorothioate linkage
  modified_base 13: mod_base = OTHER; note = Nucleotide with phosphorothioate linkage
  modified_base 14: mod_base = OTHER; note = Nucleotide with phosphorothioate linkage
  modified_base 15: mod_base = OTHER; note = beta-D-oxy locked nucleotide with phosphorothioate linkage
  modified_base 16: mod_base = OTHER; note = beta-D-oxy locked nucleotide with phosphorothioate linkage
  modified_base 17: mod_base = OTHER; note = 5-methyl beta-D-oxy locked nucleotide with phosphorothioate linkage
  modified_base 18: mod_base = OTHER; note = beta-D-oxy locked nucleotide with phosphorothioate linkage
ctttatctgacaaataca

SEQ ID NO: 320 - DNA, 17 bp, synthetic construct
  source 1..17: mol_type = other DNA
  modified_base 1: mod_base = OTHER; note = beta-D-oxy locked nucleotide with phosphorothioate linkage
  modified_base 2: mod_base = OTHER; note = 5-methyl beta-D-oxy locked nucleotide with phosphorothioate linkage
  modified_base 3: mod_base = OTHER; note = Nucleotide with phosphorothioate linkage
  modified_base 4: mod_base = OTHER; note = Nucleotide with phosphorothioate linkage
  modified_base 5: mod_base = OTHER; note = Nucleotide with phosphorothioate linkage
  modified_base 6: mod_base = OTHER; note = Nucleotide with phosphorothioate linkage
  modified_base 7: mod_base = OTHER; note = Nucleotide with phosphorothioate linkage
  modified_base 8: mod_base = OTHER; note = Nucleotide with phosphorothioate linkage
  modified_base 9: mod_base = OTHER; note = Nucleotide with phosphorothioate linkage
  modified_base 10: mod_base = OTHER; note = Nucleotide with phosphorothioate linkage
  modified_base 11: mod_base = OTHER; note = Nucleotide with phosphorothioate linkage
  modified_base 12: mod_base = OTHER; note = Nucleotide with phosphorothioate linkage
  modified_base 13: mod_base = OTHER; note = Nucleotide with phosphorothioate linkage
  modified_base 14: mod_base = OTHER; note = Nucleotide with phosphorothioate linkage
  modified_base 15: mod_base = OTHER; note = Nucleotide with phosphorothioate linkage
  modified_base 16: mod_base = OTHER; note = 5-methyl beta-D-oxy locked nucleotide with phosphorothioate linkage
  modified_base 17: mod_base = OTHER; note = beta-D-oxy locked nucleotide with phosphorothioate linkage
tcacttaccacatccct

SEQ ID NO: 321 - DNA, 17 bp, synthetic construct
  source 1..17: mol_type = other DNA
  modified_base 1: mod_base = OTHER; note = beta-D-oxy locked nucleotide with phosphorothioate linkage
  modified_base 2: mod_base = OTHER; note = beta-D-oxy locked nucleotide with phosphorothioate linkage
  modified_base 3: mod_base = OTHER; note = Nucleotide with phosphorothioate linkage
  modified_base 4: mod_base = OTHER; note = Nucleotide with phosphorothioate linkage
  modified_base 5: mod_base = OTHER; note = Nucleotide with phosphorothioate linkage
  modified_base 6: mod_base = OTHER; note = Nucleotide with phosphorothioate linkage
  modified_base 7: mod_base = OTHER; note = Nucleotide with phosphorothioate linkage
  modified_base 8: mod_base = OTHER; note = Nucleotide with phosphorothioate linkage
  modified_base 9: mod_base = OTHER; note = Nucleotide with phosphorothioate linkage
  modified_base 10: mod_base = OTHER; note = Nucleotide with phosphorothioate linkage
  modified_base 11: mod_base = OTHER; note = Nucleotide with phosphorothioate linkage
  modified_base 12: mod_base = OTHER; note = Nucleotide with phosphorothioate linkage
  modified_base 13: mod_base = OTHER; note = Nucleotide with phosphorothioate linkage
  modified_base 14: mod_base = OTHER; note = Nucleotide with phosphorothioate linkage
  modified_base 15: mod_base = OTHER; note = Nucleotide with phosphorothioate linkage
  modified_base 16: mod_base = OTHER; note = 5-methyl beta-D-oxy locked nucleotide with phosphorothioate linkage
  modified_base 17: mod_base = OTHER; note = 5-methyl beta-D-oxy locked nucleotide with phosphorothioate linkage
gatcacttaccacatcc

SEQ ID NO: 322 - DNA, 17 bp, synthetic construct
  source 1..17: mol_type = other DNA
  modified_base 1: mod_base = OTHER; note = 5-methyl beta-D-oxy locked nucleotide with phosphorothioate linkage
  modified_base 2: mod_base = OTHER; note = beta-D-oxy locked nucleotide with phosphorothioate linkage
  modified_base 3: mod_base = OTHER; note = beta-D-oxy locked nucleotide with phosphorothioate linkage
  modified_base 4: mod_base = OTHER; note = Nucleotide with phosphorothioate linkage
  modified_base 5: mod_base = OTHER; note = Nucleotide with phosphorothioate linkage
  modified_base 6: mod_base = OTHER; note = Nucleotide with phosphorothioate linkage
  modified_base 7: mod_base = OTHER; note = Nucleotide with phosphorothioate linkage
  modified_base 8: mod_base = OTHER; note = Nucleotide with phosphorothioate linkage
  modified_base 9: mod_base = OTHER; note = Nucleotide with phosphorothioate linkage
  modified_base 10: mod_base = OTHER; note = Nucleotide with phosphorothioate linkage
  modified_base 11: mod_base = OTHER; note = Nucleotide with phosphorothioate linkage
  modified_base 12: mod_base = OTHER; note = Nucleotide with phosphorothioate linkage
  modified_base 13: mod_base = OTHER; note = Nucleotide with phosphorothioate linkage
  modified_base 14: mod_base = OTHER; note = Nucleotide with phosphorothioate linkage
  modified_base 15: mod_base = OTHER; note = Nucleotide with phosphorothioate linkage
  modified_base 16: mod_base = OTHER; note = beta-D-oxy locked nucleotide with phosphorothioate linkage
  modified_base 17: mod_base = OTHER; note = beta-D-oxy locked nucleotide with phosphorothioate linkage
ctgatcacttaccacat

SEQ ID NO: 323 - DNA, 17 bp, synthetic construct
  source 1..17: mol_type = other DNA
  modified_base 1: mod_base = OTHER; note = beta-D-oxy locked nucleotide with phosphorothioate linkage
  modified_base 2: mod_base = OTHER; note = 5-methyl beta-D-oxy locked nucleotide with phosphorothioate linkage
  modified_base 3: mod_base = OTHER; note = 5-methyl beta-D-oxy locked nucleotide with phosphorothioate linkage
  modified_base 4: mod_base = OTHER; note = Nucleotide with phosphorothioate linkage
  modified_base 5: mod_base = OTHER; note = Nucleotide with phosphorothioate linkage
  modified_base 6: mod_base = OTHER; note = Nucleotide with phosphorothioate linkage
  modified_base 7: mod_base = OTHER; note = Nucleotide with phosphorothioate linkage
  modified_base 8: mod_base = OTHER; note = Nucleotide with phosphorothioate linkage
  modified_base 9: mod_base = OTHER; note = Nucleotide with phosphorothioate linkage
  modified_base 10: mod_base = OTHER; note = Nucleotide with phosphorothioate linkage
  modified_base 11: mod_base = OTHER; note = Nucleotide with phosphorothioate linkage
  modified_base 12: mod_base = OTHER; note = Nucleotide with phosphorothioate linkage
  modified_base 13: mod_base = OTHER; note = Nucleotide with phosphorothioate linkage
  modified_base 14: mod_base = OTHER; note = Nucleotide with phosphorothioate linkage
  modified_base 15: mod_base = OTHER; note = Nucleotide with phosphorothioate linkage
  modified_base 16: mod_base = OTHER; note = beta-D-oxy locked nucleotide with phosphorothioate linkage
  modified_base 17: mod_base = OTHER; note = 5-methyl beta-D-oxy locked nucleotide with phosphorothioate linkage
acctgatcacttaccac

SEQ ID NO: 324 - DNA, 16 bp, synthetic construct
  source 1..16: mol_type = other DNA
  modified_base 1: mod_base = OTHER; note = beta-D-oxy locked nucleotide with phosphorothioate linkage
  modified_base 2: mod_base = OTHER; note = beta-D-oxy locked nucleotide with phosphorothioate linkage
  modified_base 3: mod_base = OTHER; note = beta-D-oxy locked nucleotide with phosphorothioate linkage
  modified_base 4: mod_base = OTHER; note = 5-methyl beta-D-oxy locked nucleotide with phosphorothioate linkage
  modified_base 5: mod_base = OTHER; note = Nucleotide with phosphorothioate linkage
  modified_base 6: mod_base = OTHER; note = Nucleotide with phosphorothioate linkage
  modified_base 7: mod_base = OTHER; note = Nucleotide with phosphorothioate linkage
  modified_base 8: mod_base = OTHER; note = Nucleotide with phosphorothioate linkage
  modified_base 9: mod_base = OTHER; note = Nucleotide with phosphorothioate linkage
  modified_base 10: mod_base = OTHER; note = Nucleotide with phosphorothioate linkage
  modified_base 11: mod_base = OTHER; note = Nucleotide with phosphorothioate linkage
  modified_base 12: mod_base = OTHER; note = Nucleotide with phosphorothioate linkage
  modified_base 13: mod_base = OTHER; note = Nucleotide with phosphorothioate linkage
  modified_base 14: mod_base = OTHER; note = Nucleotide with phosphorothioate linkage
  modified_base 15: mod_base = OTHER; note = beta-D-oxy locked nucleotide with phosphorothioate linkage
  modified_base 16: mod_base = OTHER; note = 5-methyl beta-D-oxy locked nucleotide with phosphorothioate linkage
atacctgatcacttac

SEQ ID NO: 325 - DNA, 16 bp, synthetic construct
  source 1..16: mol_type = other DNA
  modified_base 1: mod_base = OTHER; note = beta-D-oxy locked nucleotide with phosphorothioate linkage
  modified_base 2: mod_base = OTHER; note = beta-D-oxy locked nucleotide with phosphorothioate linkage
  modified_base 3: mod_base = OTHER; note = beta-D-oxy locked nucleotide with phosphorothioate linkage
  modified_base 4: mod_base = OTHER; note = beta-D-oxy locked nucleotide with phosphorothioate linkage
  modified_base 5: mod_base = OTHER; note = Nucleotide with phosphorothioate linkage
  modified_base 6: mod_base = OTHER; note = Nucleotide with phosphorothioate linkage
  modified_base 7: mod_base = OTHER; note = Nucleotide with phosphorothioate linkage
  modified_base 8: mod_base = OTHER; note = Nucleotide with phosphorothioate linkage
  modified_base 9: mod_base = OTHER; note = Nucleotide with phosphorothioate linkage
  modified_base 10: mod_base = OTHER; note = Nucleotide with phosphorothioate linkage
  modified_base 11: mod_base = OTHER; note = Nucleotide with phosphorothioate linkage
  modified_base 12: mod_base = OTHER; note = Nucleotide with phosphorothioate linkage
  modified_base 13: mod_base = OTHER; note = 5-methyl beta-D-oxy locked nucleotide with phosphorothioate linkage
  modified_base 14: mod_base = OTHER; note = beta-D-oxy locked nucleotide with phosphorothioate linkage
  modified_base 15: mod_base = OTHER; note = beta-D-oxy locked nucleotide with phosphorothioate linkage
  modified_base 16: mod_base = OTHER; note = 5-methyl beta-D-oxy locked nucleotide with phosphorothioate linkage
ggaaatcacatacaac

SEQ ID NO: 326 - DNA, 19 bp, synthetic construct
  source 1..19: mol_type = other DNA
  modified_base 1: mod_base = OTHER; note = beta-D-oxy locked nucleotide with phosphorothioate linkage
  modified_base 2: mod_base = OTHER; note = beta-D-oxy locked nucleotide with phosphorothioate linkage
  modified_base 3: mod_base = OTHER; note = beta-D-oxy locked nucleotide with phosphorothioate linkage
  modified_base 4: mod_base = OTHER; note = beta-D-oxy locked nucleotide with phosphorothioate linkage
  modified_base 5: mod_base = OTHER; note = Nucleotide with phosphorothioate linkage
  modified_base 6: mod_base = OTHER; note = Nucleotide with phosphorothioate linkage
  modified_base 7: mod_base = OTHER; note = Nucleotide with phosphorothioate linkage
  modified_base 8: mod_base = OTHER; note = Nucleotide with phosphorothioate linkage
  modified_base 9: mod_base = OTHER; note = Nucleotide with phosphorothioate linkage
  modified_base 10: mod_base = OTHER; note = Nucleotide with phosphorothioate linkage
  modified_base 11: mod_base = OTHER; note = Nucleotide with phosphorothioate linkage
  modified_base 12: mod_base = OTHER; note = Nucleotide with phosphorothioate linkage
  modified_base 13: mod_base = OTHER; note = Nucleotide with phosphorothioate linkage
  modified_base 14: mod_base = OTHER; note = Nucleotide with phosphorothioate linkage
  modified_base 15: mod_base = OTHER; note = Nucleotide with phosphorothioate linkage
  modified_base 16: mod_base = OTHER; note = beta-D-oxy locked nucleotide with phosphorothioate linkage
  modified_base 17: mod_base = OTHER; note = beta-D-oxy locked nucleotide with phosphorothioate linkage
  modified_base 18: mod_base = OTHER; note = 5-methyl beta-D-oxy locked nucleotide with phosphorothioate linkage
  modified_base 19: mod_base = OTHER; note = beta-D-oxy locked nucleotide with phosphorothioate linkage
gaataaacaaatatataca

SEQ ID NO: 327 - DNA, 17 bp, synthetic construct
  source 1..17: mol_type = other DNA
  modified_base 1: mod_base = OTHER; note = beta-D-oxy locked nucleotide with phosphorothioate linkage
  modified_base 2: mod_base = OTHER; note = beta-D-oxy locked nucleotide with phosphorothioate linkage
  modified_base 3: mod_base = OTHER; note = 5-methyl beta-D-oxy locked nucleotide with phosphorothioate linkage
  modified_base 4: mod_base = OTHER; note = Nucleotide with phosphorothioate linkage
  modified_base 5: mod_base = OTHER; note = Nucleotide with phosphorothioate linkage
  modified_base 6: mod_base = OTHER; note = Nucleotide with phosphorothioate linkage
  modified_base 7: mod_base = OTHER; note = Nucleotide with phosphorothioate linkage
  modified_base 8: mod_base = OTHER; note = Nucleotide with phosphorothioate linkage
  modified_base 9: mod_base = OTHER; note = Nucleotide with phosphorothioate linkage
  modified_base 10: mod_base = OTHER; note = Nucleotide with phosphorothioate linkage
  modified_base 11: mod_base = OTHER; note = Nucleotide with phosphorothioate linkage
  modified_base 12: mod_base = OTHER; note = Nucleotide with phosphorothioate linkage
  modified_base 13: mod_base = OTHER; note = Nucleotide with phosphorothioate linkage
  modified_base 14: mod_base = OTHER; note = beta-D-oxy locked nucleotide with phosphorothioate linkage
  modified_base 15: mod_base = OTHER; note = 5-methyl beta-D-oxy locked nucleotide with phosphorothioate linkage
  modified_base 16: mod_base = OTHER; note = 5-methyl beta-D-oxy locked nucleotide with phosphorothioate linkage
  modified_base 17: mod_base = OTHER; note = beta-D-oxy locked nucleotide with phosphorothioate linkage
aacaggaccaaacacct

SEQ ID NO: 328 - DNA, 15 bp, synthetic construct
  source 1..15: mol_type = other DNA
  modified_base 1: mod_base = OTHER; note = beta-D-oxy locked nucleotide with phosphorothioate linkage
  modified_base 2: mod_base = OTHER; note = beta-D-oxy locked nucleotide with phosphorothioate linkage
  modified_base 3: mod_base = OTHER; note = beta-D-oxy locked nucleotide with phosphorothioate linkage
  modified_base 4: mod_base = OTHER; note = 5-methyl beta-D-oxy locked nucleotide with phosphorothioate linkage
  modified_base 5: mod_base = OTHER; note = Nucleotide with phosphorothioate linkage
  modified_base 6: mod_base = OTHER; note = Nucleotide with phosphorothioate linkage
  modified_base 7: mod_base = OTHER; note = Nucleotide with phosphorothioate linkage
  modified_base 8: mod_base = OTHER; note = Nucleotide with phosphorothioate linkage
  modified_base 9: mod_base = OTHER; note = Nucleotide with phosphorothioate linkage
  modified_base 10: mod_base = OTHER; note = Nucleotide with phosphorothioate linkage
  modified_base 11: mod_base = OTHER; note = Nucleotide with phosphorothioate linkage
  modified_base 12: mod_base = OTHER; note = 5-methyl beta-D-oxy locked nucleotide with phosphorothioate linkage
  modified_base 13: mod_base = OTHER; note = beta-D-oxy locked nucleotide with phosphorothioate linkage
  modified_base 14: mod_base = OTHER; note = beta-D-oxy locked nucleotide with phosphorothioate linkage
  modified_base 15: mod_base = OTHER; note = beta-D-oxy locked nucleotide with phosphorothioate linkage
tttcacgacgtcatt

SEQ ID NO: 329 - DNA, 16 bp, synthetic construct
  source 1..16: mol_type = other DNA
  modified_base 1: mod_base = OTHER; note = beta-D-oxy locked nucleotide with phosphorothioate linkage
  modified_base 2: mod_base = OTHER; note = beta-D-oxy locked nucleotide with phosphorothioate linkage
  modified_base 3: mod_base = OTHER; note = 5-methyl beta-D-oxy locked nucleotide with phosphorothioate linkage
  modified_base 4: mod_base = OTHER; note = Nucleotide with phosphorothioate linkage
  modified_base 5: mod_base = OTHER; note = Nucleotide with phosphorothioate linkage
  modified_base 6: mod_base = OTHER; note = Nucleotide with phosphorothioate linkage
  modified_base 7: mod_base = OTHER; note = Nucleotide with phosphorothioate linkage
  modified_base 8: mod_base = OTHER; note = Nucleotide with phosphorothioate linkage
  modified_base 9: mod_base = OTHER; note = Nucleotide with phosphorothioate linkage
  modified_base 10: mod_base = OTHER; note = Nucleotide with phosphorothioate linkage
  modified_base 11: mod_base = OTHER; note = Nucleotide with phosphorothioate linkage
  modified_base 12: mod_base = OTHER; note = Nucleotide with phosphorothioate linkage
  modified_base 13: mod_base = OTHER; note = Nucleotide with phosphorothioate linkage
  modified_base 14: mod_base = OTHER; note = 5-methyl beta-D-oxy locked nucleotide with phosphorothioate linkage
  modified_base 15: mod_base = OTHER; note = beta-D-oxy locked nucleotide with phosphorothioate linkage
  modified_base 16: mod_base = OTHER; note = beta-D-oxy locked nucleotide with phosphorothioate linkage
gacttcaatgtcccaa

SEQ ID NO: 330 - DNA, 17 bp, synthetic construct
  source 1..17: mol_type = other DNA
  modified_base 1: mod_base = OTHER; note = 5-methyl beta-D-oxy locked nucleotide with phosphorothioate linkage
  modified_base 2: mod_base = OTHER; note = 5-methyl beta-D-oxy locked nucleotide with phosphorothioate linkage
  modified_base 3: mod_base = OTHER; note = Nucleotide with phosphorothioate linkage
  modified_base 4: mod_base = OTHER; note = Nucleotide with phosphorothioate linkage
  modified_base 5: mod_base = OTHER; note = Nucleotide with phosphorothioate linkage
  modified_base 6: mod_base = OTHER; note = Nucleotide with phosphorothioate linkage
  modified_base 7: mod_base = OTHER; note = Nucleotide with phosphorothioate linkage
  modified_base 8: mod_base = OTHER; note = Nucleotide with phosphorothioate linkage
  modified_base 9: mod_base = OTHER; note = Nucleotide with phosphorothioate linkage
  modified_base 10: mod_base = OTHER; note = Nucleotide with phosphorothioate linkage
  modified_base 11: mod_base = OTHER; note = Nucleotide with phosphorothioate linkage
  modified_base 12: mod_base = OTHER; note = Nucleotide with phosphorothioate linkage
  modified_base 13: mod_base = OTHER; note = Nucleotide with phosphorothioate linkage
  modified_base 14: mod_base = OTHER; note = Nucleotide with phosphorothioate linkage
  modified_base 15: mod_base = OTHER; note = Nucleotide with phosphorothioate linkage
  modified_base 16: mod_base = OTHER; note = beta-D-oxy locked nucleotide with phosphorothioate linkage
  modified_base 17: mod_base = OTHER; note = 5-methyl beta-D-oxy locked nucleotide with phosphorothioate linkage
cctaaatcctctcattc

SEQ ID NO: 331 - DNA, 17 bp, synthetic construct
  source 1..17: mol_type = other DNA
  modified_base 1: mod_base = OTHER; note = beta-D-oxy locked nucleotide with phosphorothioate linkage
  modified_base 2: mod_base = OTHER; note = 5-methyl beta-D-oxy locked nucleotide with phosphorothioate linkage
  modified_base 3: mod_base = OTHER; note = Nucleotide with phosphorothioate linkage
  modified_base 4: mod_base = OTHER; note = Nucleotide with phosphorothioate linkage
  modified_base 5: mod_base = OTHER; note = Nucleotide with phosphorothioate linkage
  modified_base 6: mod_base = OTHER; note = Nucleotide with phosphorothioate linkage
  modified_base 7: mod_base = OTHER; note = Nucleotide with phosphorothioate linkage
  modified_base 8: mod_base = OTHER; note = Nucleotide with phosphorothioate linkage
  modified_base 9: mod_base = OTHER; note = Nucleotide with phosphorothioate linkage
  modified_base 10: mod_base = OTHER; note = Nucleotide with phosphorothioate linkage
  modified_base 11: mod_base = OTHER; note = Nucleotide with phosphorothioate linkage
  modified_base 12: mod_base = OTHER; note = Nucleotide with phosphorothioate linkage
  modified_base 13: mod_base = OTHER; note = Nucleotide with phosphorothioate linkage
  modified_base 14: mod_base = OTHER; note = Nucleotide with phosphorothioate linkage
  modified_base 15: mod_base = OTHER; note = Nucleotide with phosphorothioate linkage
  modified_base 16: mod_base = OTHER; note = beta-D-oxy locked nucleotide with phosphorothioate linkage
  modified_base 17: mod_base = OTHER; note = beta-D-oxy locked nucleotide with phosphorothioate linkage
acacacagccccctaaa

SEQ ID NO: 332 - DNA, 16 bp, synthetic construct
  source 1..16: mol_type = other DNA
  modified_base 1: mod_base = OTHER; note = beta-D-oxy locked nucleotide with phosphorothioate linkage
  modified_base 2: mod_base = OTHER; note = 5-methyl beta-D-oxy locked nucleotide with phosphorothioate linkage
  modified_base 3: mod_base = OTHER; note = Nucleotide with phosphorothioate linkage
  modified_base 4: mod_base = OTHER; note = Nucleotide with phosphorothioate linkage
  modified_base 5: mod_base = OTHER; note = Nucleotide with phosphorothioate linkage
  modified_base 6: mod_base = OTHER; note = Nucleotide with phosphorothioate linkage
  modified_base 7: mod_base = OTHER; note = Nucleotide with phosphorothioate linkage
  modified_base 8: mod_base = OTHER; note = Nucleotide with phosphorothioate linkage
  modified_base 9: mod_base = OTHER; note = Nucleotide with phosphorothioate linkage
  modified_base 10: mod_base = OTHER; note = Nucleotide with phosphorothioate linkage
  modified_base 11: mod_base = OTHER; note = Nucleotide with phosphorothioate linkage
  modified_base 12: mod_base = OTHER; note = Nucleotide with phosphorothioate linkage
  modified_base 13: mod_base = OTHER; note = Nucleotide with phosphorothioate linkage
  modified_base 14: mod_base = OTHER; note = Nucleotide with phosphorothioate linkage
  modified_base 15: mod_base = OTHER; note = 5-methyl beta-D-oxy locked nucleotide with phosphorothioate linkage
  modified_base 16: mod_base = OTHER; note = 5-methyl beta-D-oxy locked nucleotide with phosphorothioate linkage
gcagaacctttactcc

SEQ ID NO: 333 - DNA, 17 bp, synthetic construct
  source 1..17: mol_type = other DNA
  modified_base 1: mod_base = OTHER; note = beta-D-oxy locked nucleotide with phosphorothioate linkage
  modified_base 2: mod_base = OTHER; note = beta-D-oxy locked nucleotide with phosphorothioate linkage
  modified_base 3: mod_base = OTHER; note = beta-D-oxy locked nucleotide with phosphorothioate linkage
  modified_base 4: mod_base = OTHER; note = beta-D-oxy locked nucleotide with phosphorothioate linkage
  modified_base 5: mod_base = OTHER; note = Nucleotide with phosphorothioate linkage
  modified_base 6: mod_base = OTHER; note = Nucleotide with phosphorothioate linkage
  modified_base 7: mod_base = OTHER; note = Nucleotide with phosphorothioate linkage
  modified_base 8: mod_base = OTHER; note = Nucleotide with phosphorothioate linkage
  modified_base 9: mod_base = OTHER; note = Nucleotide with phosphorothioate linkage
  modified_base 10: mod_base = OTHER; note = Nucleotide with phosphorothioate linkage
  modified_base 11: mod_base = OTHER; note = Nucleotide with phosphorothioate linkage
  modified_base 12: mod_base = OTHER; note = Nucleotide with phosphorothioate linkage
  modified_base 13: mod_base = OTHER; note = Nucleotide with phosphorothioate linkage
  modified_base 14: mod_base = OTHER; note = beta-D-oxy locked nucleotide with phosphorothioate linkage
  modified_base 15: mod_base = OTHER; note = beta-D-oxy locked nucleotide with phosphorothioate linkage
  modified_base 16: mod_base = OTHER; note = beta-D-oxy locked nucleotide with phosphorothioate linkage
  modified_base 17: mod_base = OTHER; note = beta-D-oxy locked nucleotide with phosphorothioate linkage
tgaaactcttctataat

SEQ ID NO: 334 - DNA, 18 bp, synthetic construct
  source 1..18: mol_type = other DNA
  modified_base 1: mod_base = OTHER; note = beta-D-oxy locked nucleotide with phosphorothioate linkage
  modified_base 2: mod_base = OTHER; note = 5-methyl beta-D-oxy locked nucleotide with phosphorothioate linkage
  modified_base 3: mod_base = OTHER; note = beta-D-oxy locked nucleotide with phosphorothioate linkage
  modified_base 4: mod_base = OTHER; note = Nucleotide with phosphorothioate linkage
  modified_base 5: mod_base = OTHER; note = Nucleotide with phosphorothioate linkage
  modified_base 6: mod_base = OTHER; note = Nucleotide with phosphorothioate linkage
  modified_base 7: mod_base = OTHER; note = Nucleotide with phosphorothioate linkage
  modified_base 8: mod_base = OTHER; note = Nucleotide with phosphorothioate linkage
  modified_base 9: mod_base = OTHER; note = Nucleotide with phosphorothioate linkage
  modified_base 10: mod_base = OTHER; note = Nucleotide with phosphorothioate linkage
  modified_base 11: mod_base = OTHER; note = Nucleotide with phosphorothioate linkage
  modified_base 12: mod_base = OTHER; note = Nucleotide with phosphorothioate linkage
  modified_base 13: mod_base = OTHER; note = Nucleotide with phosphorothioate linkage
  modified_base 14: mod_base = OTHER; note = Nucleotide with phosphorothioate linkage
  modified_base 15: mod_base = OTHER; note = Nucleotide with phosphorothioate linkage
  modified_base 16: mod_base = OTHER; note = beta-D-oxy locked nucleotide with phosphorothioate linkage
  modified_base 17: mod_base = OTHER; note = beta-D-oxy locked nucleotide with phosphorothioate linkage
  modified_base 18: mod_base = OTHER; note = beta-D-oxy locked nucleotide with phosphorothioate linkage
actgaaactcttctataa

SEQ ID NO: 335 - DNA, 17 bp, synthetic construct
  source 1..17: mol_type = other DNA
  modified_base 1: mod_base = OTHER; note = beta-D-oxy locked nucleotide with phosphorothioate linkage
  modified_base 2: mod_base = OTHER; note = 5-methyl beta-D-oxy locked nucleotide with phosphorothioate linkage
  modified_base 3: mod_base = OTHER; note = Nucleotide with phosphorothioate linkage
  modified_base 4: mod_base = OTHER; note = Nucleotide with phosphorothioate linkage
  modified_base 5: mod_base = OTHER; note = Nucleotide with phosphorothioate linkage
  modified_base 6: mod_base = OTHER; note = Nucleotide with phosphorothioate linkage
  modified_base 7: mod_base = OTHER; note = Nucleotide with phosphorothioate linkage
  modified_base 8: mod_base = OTHER; note = Nucleotide with phosphorothioate linkage
  modified_base 9: mod_base = OTHER; note = Nucleotide with phosphorothioate linkage
  modified_base 10: mod_base = OTHER; note = Nucleotide with phosphorothioate linkage
  modified_base 11: mod_base = OTHER; note = Nucleotide with phosphorothioate linkage
  modified_base 12: mod_base = OTHER; note = Nucleotide with phosphorothioate linkage
  modified_base 13: mod_base = OTHER; note = Nucleotide with phosphorothioate linkage
  modified_base 14: mod_base = OTHER; note = beta-D-oxy locked nucleotide with phosphorothioate linkage
  modified_base 15: mod_base = OTHER; note = beta-D-oxy locked nucleotide with phosphorothioate linkage
  modified_base 16: mod_base = OTHER; note = beta-D-oxy locked nucleotide with phosphorothioate linkage
  modified_base 17: mod_base = OTHER; note = beta-D-oxy locked nucleotide with phosphorothioate linkage
actgaaactcttctata

SEQ ID NO: 336 - DNA, 15 bp, synthetic construct
  source 1..15: mol_type = other DNA
  modified_base 1: mod_base = OTHER; note = 5-methyl beta-D-oxy locked nucleotide with phosphorothioate linkage
  modified_base 2: mod_base = OTHER; note = beta-D-oxy locked nucleotide with phosphorothioate linkage
  modified_base 3: mod_base = OTHER; note = beta-D-oxy locked nucleotide with phosphorothioate linkage
  modified_base 4: mod_base = OTHER; note = Nucleotide with phosphorothioate linkage
  modified_base 5: mod_base = OTHER; note = Nucleotide with phosphorothioate linkage
  modified_base 6: mod_base = OTHER; note = Nucleotide with phosphorothioate linkage
  modified_base 7: mod_base = OTHER; note = Nucleotide with phosphorothioate linkage
  modified_base 8: mod_base = OTHER; note = Nucleotide with phosphorothioate linkage
  modified_base 9: mod_base = OTHER; note = Nucleotide with phosphorothioate linkage
  modified_base 10: mod_base = OTHER; note = Nucleotide with phosphorothioate linkage
  modified_base 11: mod_base = OTHER; note = Nucleotide with phosphorothioate linkage
  modified_base 12: mod_base = OTHER; note = 5-methyl beta-D-oxy locked nucleotide with phosphorothioate linkage
  modified_base 13: mod_base = OTHER; note = beta-D-oxy locked nucleotide with phosphorothioate linkage
  modified_base 14: mod_base = OTHER; note = beta-D-oxy locked nucleotide with phosphorothioate linkage
  modified_base 15: mod_base = OTHER; note = 5-methyl beta-D-oxy locked nucleotide with phosphorothioate linkage
cgtaaaccgttcttc

SEQ ID NO: 337 - DNA, 15 bp, synthetic construct
  source 1..15: mol_type = other DNA
  modified_base 1: mod_base = OTHER; note = 5-methyl beta-D-oxy locked nucleotide with phosphorothioate linkage
  modified_base 2: mod_base = OTHER; note = beta-D-oxy locked nucleotide with phosphorothioate linkage
  modified_base 3: mod_base = OTHER; note = Nucleotide with phosphorothioate linkage
  modified_base 4: mod_base = OTHER; note = Nucleotide with phosphorothioate linkage
  modified_base 5: mod_base = OTHER; note = Nucleotide with phosphorothioate linkage
  modified_base 6: mod_base = OTHER; note = Nucleotide with phosphorothioate linkage
  modified_base 7: mod_base = OTHER; note = Nucleotide with phosphorothioate linkage
  modified_base 8: mod_base = OTHER; note = Nucleotide with phosphorothioate linkage
  modified_base 9: mod_base = OTHER; note = Nucleotide with phosphorothioate linkage
  modified_base 10: mod_base = OTHER; note = Nucleotide with phosphorothioate linkage
  modified_base 11: mod_base = OTHER; note = Nucleotide with phosphorothioate linkage
  modified_base 12: mod_base = OTHER; note = Nucleotide with phosphorothioate linkage
  modified_base 13: mod_base = OTHER; note = Nucleotide with phosphorothioate linkage
  modified_base 14: mod_base = OTHER; note = beta-D-oxy locked nucleotide with phosphorothioate linkage
  modified_base 15: mod_base = OTHER; note = beta-D-oxy locked nucleotide with phosphorothioate linkage
cggatgccttaccta

SEQ ID NO: 338 - DNA, 17 bp, synthetic construct
  source 1..17: mol_type = other DNA
  modified_base 1: mod_base = OTHER; note = beta-D-oxy locked nucleotide with phosphorothioate linkage
  modified_base 2: mod_base = OTHER; note = beta-D-oxy locked nucleotide with phosphorothioate linkage
  modified_base 3: mod_base = OTHER; note = 5-methyl beta-D-oxy locked nucleotide with phosphorothioate linkage
  modified_base 4: mod_base = OTHER; note = Nucleotide with phosphorothioate linkage
  modified_base 5: mod_base = OTHER; note = Nucleotide with phosphorothioate linkage
  modified_base 6: mod_base = OTHER; note = Nucleotide with phosphorothioate linkage
  modified_base 7: mod_base = OTHER; note = Nucleotide with phosphorothioate linkage
  modified_base 8: mod_base = OTHER; note = Nucleotide with phosphorothioate linkage
  modified_base 9: mod_base = OTHER; note = Nucleotide with phosphorothioate linkage
  modified_base 10: mod_base = OTHER; note = Nucleotide with phosphorothioate linkage
  modified_base 11: mod_base = OTHER; note = Nucleotide with phosphorothioate linkage
  modified_base 12: mod_base = OTHER; note = Nucleotide with phosphorothioate linkage
  modified_base 13: mod_base = OTHER; note = Nucleotide with phosphorothioate linkage
  modified_base 14: mod_base = OTHER; note = Nucleotide with phosphorothioate linkage
  modified_base 15: mod_base = OTHER; note = Nucleotide with phosphorothioate linkage
  modified_base 16: mod_base = OTHER; note = beta-D-oxy locked nucleotide with phosphorothioate linkage
  modified_base 17: mod_base = OTHER; note = 5-methyl beta-D-oxy locked nucleotide with phosphorothioate linkage
atcctcatttcatgcac

SEQ ID NO: 339 - DNA, 17 bp, synthetic construct
  source 1..17: mol_type = other DNA
  modified_base 1: mod_base = OTHER; note = 5-methyl beta-D-oxy locked nucleotide with phosphorothioate linkage
  modified_base 2: mod_base = OTHER; note = beta-D-oxy locked nucleotide with phosphorothioate linkage
  modified_base 3: mod_base = OTHER; note = beta-D-oxy locked nucleotide with phosphorothioate linkage
  modified_base 4: mod_base = OTHER; note = beta-D-oxy locked nucleotide with phosphorothioate linkage
  modified_base 5: mod_base = OTHER; note = Nucleotide with phosphorothioate linkage
  modified_base 6: mod_base = OTHER; note = Nucleotide with phosphorothioate linkage
  modified_base 7: mod_base = OTHER; note = Nucleotide with phosphorothioate linkage
  modified_base 8: mod_base = OTHER; note = Nucleotide with phosphorothioate linkage
  modified_base 9: mod_base = OTHER; note = Nucleotide with phosphorothioate linkage
  modified_base 10: mod_base = OTHER; note = Nucleotide with phosphorothioate linkage
  modified_base 11: mod_base = OTHER; note = Nucleotide with phosphorothioate linkage
  modified_base 12: mod_base = OTHER; note = Nucleotide with phosphorothioate linkage
  modified_base 13: mod_base = OTHER; note = Nucleotide with phosphorothioate linkage
  modified_base 14: mod_base = OTHER; note = 5-methyl beta-D-oxy locked nucleotide with phosphorothioate linkage
  modified_base 15: mod_base = OTHER; note = beta-D-oxy locked nucleotide with phosphorothioate linkage
  modified_base 16: mod_base = OTHER; note = beta-D-oxy locked nucleotide with phosphorothioate linkage
  modified_base 17: mod_base = OTHER; note = beta-D-oxy locked nucleotide with phosphorothioate linkage
cgataaagtcacacaaa

SEQ ID NO: 340 - DNA, 17 bp, synthetic construct
  source 1..17: mol_type = other DNA
  modified_base 1: mod_base = OTHER; note = beta-D-oxy locked nucleotide with phosphorothioate linkage
  modified_base 2: mod_base = OTHER; note = beta-D-oxy locked nucleotide with phosphorothioate linkage
  modified_base 3: mod_base = OTHER; note = 5-methyl beta-D-oxy locked nucleotide with phosphorothioate linkage
  modified_base 4: mod_base = OTHER; note = Nucleotide with phosphorothioate linkage
  modified_base 5: mod_base = OTHER; note = Nucleotide with phosphorothioate linkage
  modified_base 6: mod_base = OTHER; note = Nucleotide with phosphorothioate linkage
  modified_base 7: mod_base = OTHER; note = Nucleotide with phosphorothioate linkage
  modified_base 8: mod_base = OTHER; note = Nucleotide with phosphorothioate linkage
  modified_base 9: mod_base = OTHER; note = Nucleotide with phosphorothioate linkage
  modified_base 10: mod_base = OTHER; note = Nucleotide with phosphorothioate linkage
  modified_base 11: mod_base = OTHER; note = Nucleotide with phosphorothioate linkage
  modified_base 12: mod_base = OTHER; note = Nucleotide with phosphorothioate linkage
  modified_base 13: mod_base = OTHER; note = Nucleotide with phosphorothioate linkage
  modified_base 14: mod_base = OTHER; note = Nucleotide with phosphorothioate linkage
  modified_base 15: mod_base = OTHER; note = Nucleotide with phosphorothioate linkage
  modified_base 16: mod_base = OTHER; note = beta-D-oxy locked nucleotide with phosphorothioate linkage
  modified_base 17: mod_base = OTHER; note = beta-D-oxy locked nucleotide with phosphorothioate linkage
tgctttaccaccactaa

SEQ ID NO: 341 - DNA, 16 bp, synthetic construct
  source 1..16: mol_type = other DNA
  modified_base 1: mod_base = OTHER; note = 5-methyl beta-D-oxy locked nucleotide with phosphorothioate linkage
  modified_base 2: mod_base = OTHER; note = beta-D-oxy locked nucleotide with phosphorothioate linkage
  modified_base 3: mod_base = OTHER; note = beta-D-oxy locked nucleotide with phosphorothioate linkage
  modified_base 4: mod_base = OTHER; note = Nucleotide with phosphorothioate linkage
  modified_base 5: mod_base = OTHER; note = Nucleotide with phosphorothioate linkage
  modified_base 6: mod_base = OTHER; note = Nucleotide with phosphorothioate linkage
  modified_base 7: mod_base = OTHER; note = Nucleotide with phosphorothioate linkage
  modified_base 8: mod_base = OTHER; note = Nucleotide with phosphorothioate linkage
  modified_base 9: mod_base = OTHER; note = Nucleotide with phosphorothioate linkage
  modified_base 10: mod_base = OTHER; note = Nucleotide with phosphorothioate linkage
  modified_base 11: mod_base = OTHER; note = Nucleotide with phosphorothioate linkage
  modified_base 12: mod_base = OTHER; note = Nucleotide with phosphorothioate linkage
  modified_base 13: mod_base = OTHER; note = Nucleotide with phosphorothioate linkage
  modified_base 14: mod_base = OTHER; note = beta-D-oxy locked nucleotide with phosphorothioate linkage
  modified_base 15: mod_base = OTHER; note = 5-methyl beta-D-oxy locked nucleotide with phosphorothioate linkage
  modified_base 16: mod_base = OTHER; note = 5-methyl beta-D-oxy locked nucleotide with phosphorothioate linkage
cattatctgctttacc

SEQ ID NO: 342 - DNA, 17 bp, synthetic construct
  source 1..17: mol_type = other DNA
  modified_base 1: mod_base = OTHER; note = beta-D-oxy locked nucleotide with phosphorothioate linkage
  modified_base 2: mod_base = OTHER; note = 5-methyl beta-D-oxy locked nucleotide with phosphorothioate linkage
  modified_base 3: mod_base = OTHER; note = Nucleotide with phosphorothioate linkage
  modified_base 4: mod_base = OTHER; note = Nucleotide with phosphorothioate linkage
  modified_base 5: mod_base = OTHER; note = Nucleotide with phosphorothioate linkage
  modified_base 6: mod_base = OTHER; note = Nucleotide with phosphorothioate linkage
  modified_base 7: mod_base = OTHER; note = Nucleotide with phosphorothioate linkage
  modified_base 8: mod_base = OTHER; note = Nucleotide with phosphorothioate linkage
  modified_base 9: mod_base = OTHER; note = Nucleotide with phosphorothioate linkage
  modified_base 10: mod_base = OTHER; note = Nucleotide with phosphorothioate linkage
  modified_base 11: mod_base = OTHER; note = Nucleotide with phosphorothioate linkage
  modified_base 12: mod_base = OTHER; note = Nucleotide with phosphorothioate linkage
  modified_base 13: mod_base = OTHER; note = Nucleotide with phosphorothioate linkage
  modified_base 14: mod_base = OTHER; note = Nucleotide with phosphorothioate linkage
  modified_base 15: mod_base = OTHER; note = Nucleotide with phosphorothioate linkage
  modified_base 16: mod_base = OTHER; note = 5-methyl beta-D-oxy locked nucleotide with phosphorothioate linkage
  modified_base 17: mod_base = OTHER; note = beta-D-oxy locked nucleotide with phosphorothioate linkage
tctcagtctcattatct

SEQ ID NO: 343 - DNA, 16 bp, synthetic construct
  source 1..16: mol_type = other DNA
  modified_base 1: mod_base = OTHER; note = beta-D-oxy locked nucleotide with phosphorothioate linkage
  modified_base 2: mod_base = OTHER; note = 5-methyl beta-D-oxy locked nucleotide with phosphorothioate linkage
  modified_base 3: mod_base = OTHER; note = Nucleotide with phosphorothioate linkage
  modified_base 4: mod_base = OTHER; note = Nucleotide with phosphorothioate linkage
  modified_base 5: mod_base = OTHER; note = Nucleotide with phosphorothioate linkage
  modified_base 6: mod_base = OTHER; note = Nucleotide with phosphorothioate linkage
  modified_base 7: mod_base = OTHER; note = Nucleotide with phosphorothioate linkage
  modified_base 8: mod_base = OTHER; note = Nucleotide with phosphorothioate linkage
  modified_base 9: mod_base = OTHER; note = Nucleotide with phosphorothioate linkage
  modified_base 10: mod_base = OTHER; note = Nucleotide with phosphorothioate linkage
  modified_base 11: mod_base = OTHER; note = Nucleotide with phosphorothioate linkage
  modified_base 12: mod_base = OTHER; note = Nucleotide with phosphorothioate linkage
  modified_base 13: mod_base = OTHER; note = Nucleotide with phosphorothioate linkage
  modified_base 14: mod_base = OTHER; note = Nucleotide with phosphorothioate linkage
  modified_base 15: mod_base = OTHER; note = beta-D-oxy locked nucleotide with phosphorothioate linkage
  modified_base 16: mod_base = OTHER; note = 5-methyl beta-D-oxy locked nucleotide with phosphorothioate linkage
accatgccgaccacac

SEQ ID NO: 344 - DNA, 16 bp, synthetic construct
  source 1..16: mol_type = other DNA
  modified_base 1: mod_base = OTHER; note = beta-D-oxy locked nucleotide with phosphorothioate linkage
  modified_base 2: mod_base = OTHER; note = beta-D-oxy locked nucleotide with phosphorothioate linkage
  modified_base 3: mod_base = OTHER; note = beta-D-oxy locked nucleotide with phosphorothioate linkage
  modified_base 4: mod_base = OTHER; note = 5-methyl beta-D-oxy locked nucleotide with phosphorothioate linkage
  modified_base 5: mod_base = OTHER; note = Nucleotide with phosphorothioate linkage
  modified_base 6: mod_base = OTHER; note = Nucleotide with phosphorothioate linkage
  modified_base 7: mod_base = OTHER; note = Nucleotide with phosphorothioate linkage
  modified_base 8: mod_base = OTHER; note = Nucleotide with phosphorothioate linkage
  modified_base 9: mod_base = OTHER; note = Nucleotide with phosphorothioate linkage
  modified_base 10: mod_base = OTHER; note = Nucleotide with phosphorothioate linkage
  modified_base 11: mod_base = OTHER; note = Nucleotide with phosphorothioate linkage
  modified_base 12: mod_base = OTHER; note = Nucleotide with phosphorothioate linkage
  modified_base 13: mod_base = OTHER; note = Nucleotide with phosphorothioate linkage
  modified_base 14: mod_base = OTHER; note = beta-D-oxy locked nucleotide with phosphorothioate linkage
  modified_base 15: mod_base = OTHER; note = beta-D-oxy locked nucleotide with phosphorothioate linkage
  modified_base 16: mod_base = OTHER; note = beta-D-oxy locked nucleotide with phosphorothioate linkage
gatccgtatctttata

SEQ ID NO: 345 - DNA, 16 bp, synthetic construct
  source 1..16: mol_type = other DNA
  modified_base 1: mod_base = OTHER; note = beta-D-oxy locked nucleotide with phosphorothioate linkage
  modified_base 2: mod_base = OTHER; note = 5-methyl beta-D-oxy locked nucleotide with phosphorothioate linkage
  modified_base 3: mod_base = OTHER; note = beta-D-oxy locked nucleotide with phosphorothioate linkage
  modified_base 4: mod_base = OTHER; note = beta-D-oxy locked nucleotide with phosphorothioate linkage
  modified_base 5: mod_base = OTHER; note = Nucleotide with phosphorothioate linkage
  modified_base 6: mod_base = OTHER; note = Nucleotide with phosphorothioate linkage
  modified_base 7: mod_base = OTHER; note = Nucleotide with phosphorothioate linkage
  modified_base 8: mod_base = OTHER; note = Nucleotide with phosphorothioate linkage
  modified_base 9: mod_base = OTHER; note = Nucleotide with phosphorothioate linkage
  modified_base 10: mod_base = OTHER; note = Nucleotide with phosphorothioate linkage
  modified_base 11: mod_base = OTHER; note = Nucleotide with phosphorothioate linkage
  modified_base 12: mod_base = OTHER; note = Nucleotide with phosphorothioate linkage
  modified_base 13: mod_base = OTHER; note = Nucleotide with phosphorothioate linkage
  modified_base 14: mod_base = OTHER; note = Nucleotide with phosphorothioate linkage
  modified_base 15: mod_base = OTHER; note = beta-D-oxy locked nucleotide with phosphorothioate linkage
  modified_base 16: mod_base = OTHER; note = 5-methyl beta-D-oxy locked nucleotide with phosphorothioate linkage
gcgttctctttacttc

SEQ ID NO: 346 - DNA, 17 bp, synthetic construct
  source 1..17: mol_type = other DNA
  modified_base 1: mod_base = OTHER; note = beta-D-oxy locked nucleotide with phosphorothioate linkage
  modified_base 2: mod_base = OTHER; note = beta-D-oxy locked nucleotide with phosphorothioate linkage
  modified_base 3: mod_base = OTHER; note = beta-D-oxy locked nucleotide with phosphorothioate linkage
  modified_base 4: mod_base = OTHER; note = Nucleotide with phosphorothioate linkage
  modified_base 5: mod_base = OTHER; note = Nucleotide with phosphorothioate linkage
  modified_base 6: mod_base = OTHER; note = Nucleotide with phosphorothioate linkage
  modified_base 7: mod_base = OTHER; note = Nucleotide with phosphorothioate linkage
  modified_base 8: mod_base = OTHER; note = Nucleotide with phosphorothioate linkage
  modified_base 9: mod_base = OTHER; note = Nucleotide with phosphorothioate linkage
  modified_base 10: mod_base = OTHER; note = Nucleotide with phosphorothioate linkage
  modified_base 11: mod_base = OTHER; note = Nucleotide with phosphorothioate linkage
  modified_base 12: mod_base = OTHER; note = Nucleotide with phosphorothioate linkage
  modified_base 13: mod_base = OTHER; note = Nucleotide with phosphorothioate linkage
  modified_base 14: mod_base = OTHER; note = Nucleotide with phosphorothioate linkage
  modified_base 15: mod_base = OTHER; note = Nucleotide with phosphorothioate linkage
  modified_base 16: mod_base = OTHER; note = 5-methyl beta-D-oxy locked nucleotide with phosphorothioate linkage
  modified_base 17: mod_base = OTHER; note = beta-D-oxy locked nucleotide with phosphorothioate linkage
atagcaaccatttcact

SEQ ID NO: 347 - DNA, 16 bp, synthetic construct
  source 1..16: mol_type = other DNA
  modified_base 1: mod_base = OTHER; note = beta-D-oxy locked nucleotide with phosphorothioate linkage
  modified_base 2: mod_base = OTHER; note = 5-methyl beta-D-oxy locked nucleotide with phosphorothioate linkage
  modified_base 3: mod_base = OTHER; note = Nucleotide with phosphorothioate linkage
  modified_base 4: mod_base = OTHER; note = Nucleotide with phosphorothioate linkage
  modified_base 5: mod_base = OTHER; note = Nucleotide with phosphorothioate linkage
  modified_base 6: mod_base = OTHER; note = Nucleotide with phosphorothioate linkage
  modified_base 7: mod_base = OTHER; note = Nucleotide with phosphorothioate linkage
  modified_base 8: mod_base = OTHER; note = Nucleotide with phosphorothioate linkage
  modified_base 9: mod_base = OTHER; note = Nucleotide with phosphorothioate linkage
  modified_base 10: mod_base = OTHER; note = Nucleotide with phosphorothioate linkage
  modified_base 11: mod_base = OTHER; note = Nucleotide with phosphorothioate linkage
  modified_base 12: mod_base = OTHER; note = Nucleotide with phosphorothioate linkage
  modified_base 13: mod_base = OTHER; note = 5-methyl beta-D-oxy locked nucleotide with phosphorothioate linkage
  modified_base 14: mod_base = OTHER; note = beta-D-oxy locked nucleotide with phosphorothioate linkage
  modified_base 15: mod_base = OTHER; note = beta-D-oxy locked nucleotide with phosphorothioate linkage
  modified_base 16: mod_base = OTHER; note = 5-methyl beta-D-oxy locked nucleotide with phosphorothioate linkage
tcgttattccttctac

SEQ ID NO: 348 - DNA, 16 bp, synthetic construct
  source 1..16: mol_type = other DNA
  modified_base 1: mod_base = OTHER; note = beta-D-oxy locked nucleotide with phosphorothioate linkage
  modified_base 2: mod_base = OTHER; note = beta-D-oxy locked nucleotide with phosphorothioate linkage
  modified_base 3: mod_base = OTHER; note = 5-methyl beta-D-oxy locked nucleotide with phosphorothioate linkage
  modified_base 4: mod_base = OTHER; note = beta-D-oxy locked nucleotide with phosphorothioate linkage
  modified_base 5: mod_base = OTHER; note = Nucleotide with phosphorothioate linkage
  modified_base 6: mod_base = OTHER; note = Nucleotide with phosphorothioate linkage
  modified_base 7: mod_base = OTHER; note = Nucleotide with phosphorothioate linkage
  modified_base 8: mod_base = OTHER; note = Nucleotide with phosphorothioate linkage
  modified_base 9: mod_base = OTHER; note = Nucleotide with phosphorothioate linkage
  modified_base 10: mod_base = OTHER; note = Nucleotide with phosphorothioate linkage
  modified_base 11: mod_base = OTHER; note = Nucleotide with phosphorothioate linkage
  modified_base 12: mod_base = OTHER; note = Nucleotide with phosphorothioate linkage
  modified_base 13: mod_base = OTHER; note = Nucleotide with phosphorothioate linkage
  modified_base 14: mod_base = OTHER; note = 5-methyl beta-D-oxy locked nucleotide with phosphorothioate linkage
  modified_base 15: mod_base = OTHER; note = beta-D-oxy locked nucleotide with phosphorothioate linkage
  modified_base 16: mod_base = OTHER; note = beta-D-oxy locked nucleotide with phosphorothioate linkage
ttcgttattccttcta

SEQ ID NO: 349 - DNA, 17 bp, synthetic construct
  source 1..17: mol_type = other DNA
  modified_base 1: mod_base = OTHER; note = beta-D-oxy locked nucleotide with phosphorothioate linkage
  modified_base 2: mod_base = OTHER; note = beta-D-oxy locked nucleotide with phosphorothioate linkage
  modified_base 3: mod_base = OTHER; note = 5-methyl beta-D-oxy locked nucleotide with phosphorothioate linkage
  modified_base 4: mod_base = OTHER; note = beta-D-oxy locked nucleotide with phosphorothioate linkage
  modified_base 5: mod_base = OTHER; note = Nucleotide with phosphorothioate linkage
  modified_base 6: mod_base = OTHER; note = Nucleotide with phosphorothioate linkage
  modified_base 7: mod_base = OTHER; note = Nucleotide with phosphorothioate linkage
  modified_base 8: mod_base = OTHER; note = Nucleotide with phosphorothioate linkage
  modified_base 9: mod_base = OTHER; note = Nucleotide with phosphorothioate linkage
  modified_base 10: mod_base = OTHER; note = Nucleotide with phosphorothioate linkage
  modified_base 11: mod_base = OTHER; note = Nucleotide with phosphorothioate linkage
  modified_base 12: mod_base = OTHER; note = Nucleotide with phosphorothioate linkage
  modified_base 13: mod_base = OTHER; note = Nucleotide with phosphorothioate linkage
  modified_base 14: mod_base = OTHER; note = Nucleotide with phosphorothioate linkage
  modified_base 15: mod_base = OTHER; note = Nucleotide with phosphorothioate linkage
  modified_base 16: mod_base = OTHER; note = beta-D-oxy locked nucleotide with phosphorothioate linkage
  modified_base 17: mod_base = OTHER; note = beta-D-oxy locked nucleotide with phosphorothioate linkage
ttcttattactatccat

SEQ ID NO: 350 - DNA, 19 bp, synthetic construct
  source 1..19: mol_type = other DNA
  modified_base 1: mod_base = OTHER; note = beta-D-oxy locked nucleotide with phosphorothioate linkage
  modified_base 2: mod_base = OTHER; note = beta-D-oxy locked nucleotide with phosphorothioate linkage
  modified_base 3: mod_base = OTHER; note = Nucleotide with phosphorothioate linkage
  modified_base 4: mod_base = OTHER; note = Nucleotide with phosphorothioate linkage
  modified_base 5: mod_base = OTHER; note = Nucleotide with phosphorothioate linkage
  modified_base 6: mod_base = OTHER; note = Nucleotide with phosphorothioate linkage
  modified_base 7: mod_base = OTHER; note = Nucleotide with phosphorothioate linkage
  modified_base 8: mod_base = OTHER; note = Nucleotide with phosphorothioate linkage
  modified_base 9: mod_base = OTHER; note = Nucleotide with phosphorothioate linkage
  modified_base 10: mod_base = OTHER; note = Nucleotide with phosphorothioate linkage
  modified_base 11: mod_base = OTHER; note = Nucleotide with phosphorothioate linkage
  modified_base 12: mod_base = OTHER; note = Nucleotide with phosphorothioate linkage
  modified_base 13: mod_base = OTHER; note = Nucleotide with phosphorothioate linkage
  modified_base 14: mod_base = OTHER; note = Nucleotide with phosphorothioate linkage
  modified_base 15: mod_base = OTHER; note = Nucleotide with phosphorothioate linkage
  modified_base 16: mod_base = OTHER; note = 5-methyl beta-D-oxy locked nucleotide with phosphorothioate linkage
  modified_base 17: mod_base = OTHER; note = 5-methyl beta-D-oxy locked nucleotide with phosphorothioate linkage
  modified_base 18: mod_base = OTHER; note = beta-D-oxy locked nucleotide with phosphorothioate linkage
  modified_base 19: mod_base = OTHER; note = beta-D-oxy locked nucleotide with phosphorothioate linkage
atttcttattactatccat

SEQ ID NO: 351 - DNA, 18 bp, synthetic construct
  source 1..18: mol_type = other DNA
  modified_base 1: mod_base = OTHER; note = 5-methyl beta-D-oxy locked nucleotide with phosphorothioate linkage
  modified_base 2: mod_base = OTHER; note = beta-D-oxy locked nucleotide with phosphorothioate linkage
  modified_base 3: mod_base = OTHER; note = beta-D-oxy locked nucleotide with phosphorothioate linkage
  modified_base 4: mod_base = OTHER; note = Nucleotide with phosphorothioate linkage
  modified_base 5: mod_base = OTHER; note = Nucleotide with phosphorothioate linkage
  modified_base 6: mod_base = OTHER; note = Nucleotide with phosphorothioate linkage
  modified_base 7: mod_base = OTHER; note = Nucleotide with phosphorothioate linkage
  modified_base 8: mod_base = OTHER; note = Nucleotide with phosphorothioate linkage
  modified_base 9: mod_base = OTHER; note = Nucleotide with phosphorothioate linkage
  modified_base 10: mod_base = OTHER; note = Nucleotide with phosphorothioate linkage
  modified_base 11: mod_base = OTHER; note = Nucleotide with phosphorothioate linkage
  modified_base 12: mod_base = OTHER; note = Nucleotide with phosphorothioate linkage
  modified_base 13: mod_base = OTHER; note = Nucleotide with phosphorothioate linkage
  modified_base 14: mod_base = OTHER; note = Nucleotide with phosphorothioate linkage
  modified_base 15: mod_base = OTHER; note = Nucleotide with phosphorothioate linkage
  modified_base 16: mod_base = OTHER; note = Nucleotide with phosphorothioate linkage
  modified_base 17: mod_base = OTHER; note = 5-methyl beta-D-oxy locked nucleotide with phosphorothioate linkage
  modified_base 18: mod_base = OTHER; note = 5-methyl beta-D-oxy locked nucleotide with phosphorothioate linkage
catttcttattactatcc

SEQ ID NO: 352 - DNA, 18 bp, synthetic construct
  source 1..18: mol_type = other DNA
  modified_base 1: mod_base = OTHER; note = beta-D-oxy locked nucleotide with phosphorothioate linkage
  modified_base 2: mod_base = OTHER; note = beta-D-oxy locked nucleotide with phosphorothioate linkage
  modified_base 3: mod_base = OTHER; note = Nucleotide with phosphorothioate linkage
  modified_base 4: mod_base = OTHER; note = Nucleotide with phosphorothioate linkage
  modified_base 5: mod_base = OTHER; note = Nucleotide with phosphorothioate linkage
  modified_base 6: mod_base = OTHER; note = Nucleotide with phosphorothioate linkage
  modified_base 7: mod_base = OTHER; note = Nucleotide with phosphorothioate linkage
  modified_base 8: mod_base = OTHER; note = Nucleotide with phosphorothioate linkage
  modified_base 9: mod_base = OTHER; note = Nucleotide with phosphorothioate linkage
  modified_base 10: mod_base = OTHER; note = Nucleotide with phosphorothioate linkage
  modified_base 11: mod_base = OTHER; note = Nucleotide with phosphorothioate linkage
  modified_base 12: mod_base = OTHER; note = Nucleotide with phosphorothioate linkage
  modified_base 13: mod_base = OTHER; note = Nucleotide with phosphorothioate linkage
  modified_base 14: mod_base = OTHER; note = Nucleotide with phosphorothioate linkage
  modified_base 15: mod_base = OTHER; note = Nucleotide with phosphorothioate linkage
  modified_base 16: mod_base = OTHER; note = Nucleotide with phosphorothioate linkage
  modified_base 17: mod_base = OTHER; note = beta-D-oxy locked nucleotide with phosphorothioate linkage
  modified_base 18: mod_base = OTHER; note = beta-D-oxy locked nucleotide with phosphorothioate linkage
tagcatttcttattacta

SEQ ID NO: 353 - DNA, 17 bp, synthetic construct
  source 1..17: mol_type = other DNA
  modified_base 1: mod_base = OTHER; note = beta-D-oxy locked nucleotide with phosphorothioate linkage
  modified_base 2: mod_base = OTHER; note = beta-D-oxy locked nucleotide with phosphorothioate linkage
  modified_base 3: mod_base = OTHER; note = beta-D-oxy locked nucleotide with phosphorothioate linkage
  modified_base 4: mod_base = OTHER; note = beta-D-oxy locked nucleotide with phosphorothioate linkage
  modified_base 5: mod_base = OTHER; note = Nucleotide with phosphorothioate linkage
  modified_base 6: mod_base = OTHER; note = Nucleotide with phosphorothioate linkage
  modified_base 7: mod_base = OTHER; note = Nucleotide with phosphorothioate linkage
  modified_base 8: mod_base = OTHER; note = Nucleotide with phosphorothioate linkage
  modified_base 9: mod_base = OTHER; note = Nucleotide with phosphorothioate linkage
  modified_base 10: mod_base = OTHER; note = Nucleotide with phosphorothioate linkage
  modified_base 11: mod_base = OTHER; note = Nucleotide with phosphorothioate linkage
  modified_base 12: mod_base = OTHER; note = Nucleotide with phosphorothioate linkage
  modified_base 13: mod_base = OTHER; note = Nucleotide with phosphorothioate linkage
  modified_base 14: mod_base = OTHER; note = beta-D-oxy locked nucleotide with phosphorothioate linkage
  modified_base 15: mod_base = OTHER; note = beta-D-oxy locked nucleotide with phosphorothioate linkage
  modified_base 16: mod_base = OTHER; note = beta-D-oxy locked nucleotide with phosphorothioate linkage
  modified_base 17: mod_base = OTHER; note = 5-methyl beta-D-oxy locked nucleotide with phosphorothioate linkage
ttagcatttcttattac

SEQ ID NO: 354 - DNA, 16 bp, synthetic construct
  source 1..16: mol_type = other DNA
  modified_base 1: mod_base = OTHER; note = 5-methyl beta-D-oxy locked nucleotide with phosphorothioate linkage
  modified_base 2: mod_base = OTHER; note = beta-D-oxy locked nucleotide with phosphorothioate linkage
  modified_base 3: mod_base = OTHER; note = beta-D-oxy locked nucleotide with phosphorothioate linkage
  modified_base 4: mod_base = OTHER; note = Nucleotide with phosphorothioate linkage
  modified_base 5: mod_base = OTHER; note = Nucleotide with phosphorothioate linkage
  modified_base 6: mod_base = OTHER; note = Nucleotide with phosphorothioate linkage
  modified_base 7: mod_base = OTHER; note = Nucleotide with phosphorothioate linkage
  modified_base 8: mod_base = OTHER; note = Nucleotide with phosphorothioate linkage
  modified_base 9: mod_base = OTHER; note = Nucleotide with phosphorothioate linkage
  modified_base 10: mod_base = OTHER; note = Nucleotide with phosphorothioate linkage
  modified_base 11: mod_base = OTHER; note = Nucleotide with phosphorothioate linkage
  modified_base 12: mod_base = OTHER; note = Nucleotide with phosphorothioate linkage
  modified_base 13: mod_base = OTHER; note = Nucleotide with phosphorothioate linkage
  modified_base 14: mod_base = OTHER; note = Nucleotide with phosphorothioate linkage
  modified_base 15: mod_base = OTHER; note = 5-methyl beta-D-oxy locked nucleotide with phosphorothioate linkage
  modified_base 16: mod_base = OTHER; note = beta-D-oxy locked nucleotide with phosphorothioate linkage
ctatttatatacccct

SEQ ID NO: 355 - DNA, 17 bp, synthetic construct
  source 1..17: mol_type = other DNA
  modified_base 1: mod_base = OTHER; note = beta-D-oxy locked nucleotide with phosphorothioate linkage
  modified_base 2: mod_base = OTHER; note = 5-methyl beta-D-oxy locked nucleotide with phosphorothioate linkage
  modified_base 3: mod_base = OTHER; note = 5-methyl beta-D-oxy locked nucleotide with phosphorothioate linkage
  modified_base 4: mod_base = OTHER; note = Nucleotide with phosphorothioate linkage
  modified_base 5: mod_base = OTHER; note = Nucleotide with phosphorothioate linkage
  modified_base 6: mod_base = OTHER; note = Nucleotide with phosphorothioate linkage
  modified_base 7: mod_base = OTHER; note = Nucleotide with phosphorothioate linkage
  modified_base 8: mod_base = OTHER; note = Nucleotide with phosphorothioate linkage
  modified_base 9: mod_base = OTHER; note = Nucleotide with phosphorothioate linkage
  modified_base 10: mod_base = OTHER; note = Nucleotide with phosphorothioate linkage
  modified_base 11: mod_base = OTHER; note = Nucleotide with phosphorothioate linkage
  modified_base 12: mod_base = OTHER; note = Nucleotide with phosphorothioate linkage
  modified_base 13: mod_base = OTHER; note = Nucleotide with phosphorothioate linkage
  modified_base 14: mod_base = OTHER; note = Nucleotide with phosphorothioate linkage
  modified_base 15: mod_base = OTHER; note = Nucleotide with phosphorothioate linkage
  modified_base 16: mod_base = OTHER; note = beta-D-oxy locked nucleotide with phosphorothioate linkage
  modified_base 17: mod_base = OTHER; note = beta-D-oxy locked nucleotide with phosphorothioate linkage
gccctccttttaatttt

SEQ ID NO: 356 - DNA, 17 bp, synthetic construct
  source 1..17: mol_type = other DNA
  modified_base 1: mod_base = OTHER; note = 5-methyl beta-D-oxy locked nucleotide with phosphorothioate linkage
  modified_base 2: mod_base = OTHER; note = beta-D-oxy locked nucleotide with phosphorothioate linkage
  modified_base 3: mod_base = OTHER; note = Nucleotide with phosphorothioate linkage
  modified_base 4: mod_base = OTHER; note = Nucleotide with phosphorothioate linkage
  modified_base 5: mod_base = OTHER; note = Nucleotide with phosphorothioate linkage
  modified_base 6: mod_base = OTHER; note = Nucleotide with phosphorothioate linkage
  modified_base 7: mod_base = OTHER; note = Nucleotide with phosphorothioate linkage
  modified_base 8: mod_base = OTHER; note = Nucleotide with phosphorothioate linkage
  modified_base 9: mod_base = OTHER; note = Nucleotide with phosphorothioate linkage
  modified_base 10: mod_base = OTHER; note = Nucleotide with phosphorothioate linkage
  modified_base 11: mod_base = OTHER; note = Nucleotide with phosphorothioate linkage
  modified_base 12: mod_base = OTHER; note = Nucleotide with phosphorothioate linkage
  modified_base 13: mod_base = OTHER; note = Nucleotide with phosphorothioate linkage
  modified_base 14: mod_base = OTHER; note = Nucleotide with phosphorothioate linkage
  modified_base 15: mod_base = OTHER; note = Nucleotide with phosphorothioate linkage
  modified_base 16: mod_base = OTHER; note = beta-D-oxy locked nucleotide with phosphorothioate linkage
  modified_base 17: mod_base = OTHER; note = beta-D-oxy locked nucleotide with phosphorothioate linkage
cagccctccttttaatt

SEQ ID NO: 357 - DNA, 17 bp, synthetic construct
  source 1..17: mol_type = other DNA
  modified_base 1: mod_base = OTHER; note = beta-D-oxy locked nucleotide with phosphorothioate linkage
  modified_base 2: mod_base = OTHER; note = beta-D-oxy locked nucleotide with phosphorothioate linkage
  modified_base 3: mod_base = OTHER; note = beta-D-oxy locked nucleotide with phosphorothioate linkage
  modified_base 4: mod_base = OTHER; note = beta-D-oxy locked nucleotide with phosphorothioate linkage
  modified_base 5: mod_base = OTHER; note = Nucleotide with phosphorothioate linkage
  modified_base 6: mod_base = OTHER; note = Nucleotide with phosphorothioate linkage
  modified_base 7: mod_base = OTHER; note = Nucleotide with phosphorothioate linkage
  modified_base 8: mod_base = OTHER; note = Nucleotide with phosphorothioate linkage
  modified_base 9: mod_base = OTHER; note = Nucleotide with phosphorothioate linkage
  modified_base 10: mod_base = OTHER; note = Nucleotide with phosphorothioate linkage
  modified_base 11: mod_base = OTHER; note = Nucleotide with phosphorothioate linkage
  modified_base 12: mod_base = OTHER; note = Nucleotide with phosphorothioate linkage
  modified_base 13: mod_base = OTHER; note = Nucleotide with phosphorothioate linkage
  modified_base 14: mod_base = OTHER; note = beta-D-oxy locked nucleotide with phosphorothioate linkage
  modified_base 15: mod_base = OTHER; note = beta-D-oxy locked nucleotide with phosphorothioate linkage
  modified_base 16: mod_base = OTHER; note = beta-D-oxy locked nucleotide with phosphorothioate linkage
  modified_base 17: mod_base = OTHER; note = beta-D-oxy locked nucleotide with phosphorothioate linkage
gtgattatcttttaata

SEQ ID NO: 358 - DNA, 17 bp, synthetic construct
  source 1..17: mol_type = other DNA
  modified_base 1: mod_base = OTHER; note = beta-D-oxy locked nucleotide with phosphorothioate linkage
  modified_base 2: mod_base = OTHER; note = beta-D-oxy locked nucleotide with phosphorothioate linkage
  modified_base 3: mod_base = OTHER; note = beta-D-oxy locked nucleotide with phosphorothioate linkage
  modified_base 4: mod_base = OTHER; note = 5-methyl beta-D-oxy locked nucleotide with phosphorothioate linkage
  modified_base 5: mod_base = OTHER; note = Nucleotide with phosphorothioate linkage
  modified_base 6: mod_base = OTHER; note = Nucleotide with phosphorothioate linkage
  modified_base 7: mod_base = OTHER; note = Nucleotide with phosphorothioate linkage
  modified_base 8: mod_base = OTHER; note = Nucleotide with phosphorothioate linkage
  modified_base 9: mod_base = OTHER; note = Nucleotide with phosphorothioate linkage
  modified_base 10: mod_base = OTHER; note = Nucleotide with phosphorothioate linkage
  modified_base 11: mod_base = OTHER; note = Nucleotide with phosphorothioate linkage
  modified_base 12: mod_base = OTHER; note = Nucleotide with phosphorothioate linkage
  modified_base 13: mod_base = OTHER; note = Nucleotide with phosphorothioate linkage
  modified_base 14: mod_base = OTHER; note = Nucleotide with phosphorothioate linkage
  modified_base 15: mod_base = OTHER; note = beta-D-oxy locked nucleotide with phosphorothioate linkage
  modified_base 16: mod_base = OTHER; note = beta-D-oxy locked nucleotide with phosphorothioate linkage
  modified_base 17: mod_base = OTHER; note = beta-D-oxy locked nucleotide with phosphorothioate linkage
aagcattcattcactaa

SEQ ID NO: 359 - DNA, 17 bp, synthetic construct
  source 1..17: mol_type = other DNA
  modified_base 1: mod_base = OTHER; note = beta-D-oxy locked nucleotide with phosphorothioate linkage
  modified_base 2: mod_base = OTHER; note = beta-D-oxy locked nucleotide with phosphorothioate linkage
  modified_base 3: mod_base = OTHER; note = 5-methyl beta-D-oxy locked nucleotide with phosphorothioate linkage
  modified_base 4: mod_base = OTHER; note = 5-methyl beta-D-oxy locked nucleotide with phosphorothioate linkage
  modified_base 5: mod_base = OTHER; note = Nucleotide with phosphorothioate linkage
  modified_base 6: mod_base = OTHER; note = Nucleotide with phosphorothioate linkage
  modified_base 7: mod_base = OTHER; note = Nucleotide with phosphorothioate linkage
  modified_base 8: mod_base = OTHER; note = Nucleotide with phosphorothioate linkage
  modified_base 9: mod_base = OTHER; note = Nucleotide with phosphorothioate linkage
  modified_base 10: mod_base = OTHER; note = Nucleotide with phosphorothioate linkage
  modified_base 11: mod_base = OTHER; note = Nucleotide with phosphorothioate linkage
  modified_base 12: mod_base = OTHER; note = Nucleotide with phosphorothioate linkage
  modified_base 13: mod_base = OTHER; note = Nucleotide with phosphorothioate linkage
  modified_base 14: mod_base = OTHER; note = Nucleotide with phosphorothioate linkage
  modified_base 15: mod_base = OTHER; note = Nucleotide with phosphorothioate linkage
  modified_base 16: mod_base = OTHER; note = beta-D-oxy locked nucleotide with phosphorothioate linkage
  modified_base 17: mod_base = OTHER; note = beta-D-oxy locked nucleotide with phosphorothioate linkage
atcctttcagacacaaa

SEQ ID NO: 360 - DNA, 17 bp, synthetic construct
  source 1..17: mol_type = other DNA
  modified_base 1: mod_base = OTHER; note = 5-methyl beta-D-oxy locked nucleotide with phosphorothioate linkage
  modified_base 2: mod_base = OTHER; note = beta-D-oxy locked nucleotide with phosphorothioate linkage
  modified_base 3: mod_base = OTHER; note = Nucleotide with phosphorothioate linkage
  modified_base 4: mod_base = OTHER; note = Nucleotide with phosphorothioate linkage
  modified_base 5: mod_base = OTHER; note = Nucleotide with phosphorothioate linkage
  modified_base 6: mod_base = OTHER; note = Nucleotide with phosphorothioate linkage
  modified_base 7: mod_base = OTHER; note = Nucleotide with phosphorothioate linkage
  modified_base 8: mod_base = OTHER; note = Nucleotide with phosphorothioate linkage
  modified_base 9: mod_base = OTHER; note = Nucleotide with phosphorothioate linkage
  modified_base 10: mod_base = OTHER; note = Nucleotide with phosphorothioate linkage
  modified_base 11: mod_base = OTHER; note = Nucleotide with phosphorothioate linkage
  modified_base 12: mod_base = OTHER; note = Nucleotide with phosphorothioate linkage
  modified_base 13: mod_base = OTHER; note = Nucleotide with phosphorothioate linkage
  modified_base 14: mod_base = OTHER; note = Nucleotide with phosphorothioate linkage
  modified_base 15: mod_base = OTHER; note = Nucleotide with phosphorothioate linkage
  modified_base 16: mod_base = OTHER; note = beta-D-oxy locked nucleotide with phosphorothioate linkage
  modified_base 17: mod_base = OTHER; note = beta-D-oxy locked nucleotide with phosphorothioate linkage
ctgcttatacattcctt

SEQ ID NO: 361 - DNA, 17 bp, synthetic construct
  source 1..17: mol_type = other DNA
  modified_base 1: mod_base = OTHER; note = beta-D-oxy locked nucleotide with phosphorothioate linkage
  modified_base 2: mod_base = OTHER; note = 5-methyl beta-D-oxy locked nucleotide with phosphorothioate linkage
  modified_base 3: mod_base = OTHER; note = Nucleotide with phosphorothioate linkage
  modified_base 4: mod_base = OTHER; note = Nucleotide with phosphorothioate linkage
  modified_base 5: mod_base = OTHER; note = Nucleotide with phosphorothioate linkage
  modified_base 6: mod_base = OTHER; note = Nucleotide with phosphorothioate linkage
  modified_base 7: mod_base = OTHER; note = Nucleotide with phosphorothioate linkage
  modified_base 8: mod_base = OTHER; note = Nucleotide with phosphorothioate linkage
  modified_base 9: mod_base = OTHER; note = Nucleotide with phosphorothioate linkage
  modified_base 10: mod_base = OTHER; note = Nucleotide with phosphorothioate linkage
  modified_base 11: mod_base = OTHER; note = Nucleotide with phosphorothioate linkage
  modified_base 12: mod_base = OTHER; note = Nucleotide with phosphorothioate linkage
  modified_base 13: mod_base = OTHER; note = Nucleotide with phosphorothioate linkage
  modified_base 14: mod_base = OTHER; note = Nucleotide with phosphorothioate linkage
  modified_base 15: mod_base = OTHER; note = beta-D-oxy locked nucleotide with phosphorothioate linkage
  modified_base 16: mod_base = OTHER; note = 5-methyl beta-D-oxy locked nucleotide with phosphorothioate linkage
  modified_base 17: mod_base = OTHER; note = 5-methyl beta-D-oxy locked nucleotide with phosphorothioate linkage
tcctgcttatacattcc

SEQ ID NO: 362 - DNA, 17 bp, synthetic construct
  source 1..17: mol_type = other DNA
  modified_base 1: mod_base = OTHER; note = beta-D-oxy locked nucleotide with phosphorothioate linkage
  modified_base 2: mod_base = OTHER; note = beta-D-oxy locked nucleotide with phosphorothioate linkage
  modified_base 3: mod_base = OTHER; note = Nucleotide with phosphorothioate linkage
  modified_base 4: mod_base = OTHER; note = Nucleotide with phosphorothioate linkage
  modified_base 5: mod_base = OTHER; note = Nucleotide with phosphorothioate linkage
  modified_base 6: mod_base = OTHER; note = Nucleotide with phosphorothioate linkage
  modified_base 7: mod_base = OTHER; note = Nucleotide with phosphorothioate linkage
  modified_base 8: mod_base = OTHER; note = Nucleotide with phosphorothioate linkage
  modified_base 9: mod_base = OTHER; note = Nucleotide with phosphorothioate linkage
  modified_base 10: mod_base = OTHER; note = Nucleotide with phosphorothioate linkage
  modified_base 11: mod_base = OTHER; note = Nucleotide with phosphorothioate linkage
  modified_base 12: mod_base = OTHER; note = Nucleotide with phosphorothioate linkage
  modified_base 13: mod_base = OTHER; note = Nucleotide with phosphorothioate linkage
  modified_base 14: mod_base = OTHER; note = Nucleotide with phosphorothioate linkage
  modified_base 15: mod_base = OTHER; note = beta-D-oxy locked nucleotide with phosphorothioate linkage
  modified_base 16: mod_base = OTHER; note = beta-D-oxy locked nucleotide with phosphorothioate linkage
  modified_base 17: mod_base = OTHER; note = beta-D-oxy locked nucleotide with phosphorothioate linkage
aggcctaacttcatttt

SEQ ID NO: 363 - DNA, 17 bp, synthetic construct
  source 1..17: mol_type = other DNA
  modified_base 1: mod_base = OTHER; note = beta-D-oxy locked nucleotide with phosphorothioate linkage
  modified_base 2: mod_base = OTHER; note = beta-D-oxy locked nucleotide with phosphorothioate linkage
  modified_base 3: mod_base = OTHER; note = beta-D-oxy locked nucleotide with phosphorothioate linkage
  modified_base 4: mod_base = OTHER; note = beta-D-oxy locked nucleotide with phosphorothioate linkage
  modified_base 5: mod_base = OTHER; note = Nucleotide with phosphorothioate linkage
  modified_base 6: mod_base = OTHER; note = Nucleotide with phosphorothioate linkage
  modified_base 7: mod_base = OTHER; note = Nucleotide with phosphorothioate linkage
  modified_base 8: mod_base = OTHER; note = Nucleotide with phosphorothioate linkage
  modified_base 9: mod_base = OTHER; note = Nucleotide with phosphorothioate linkage
  modified_base 10: mod_base = OTHER; note = Nucleotide with phosphorothioate linkage
  modified_base 11: mod_base = OTHER; note = Nucleotide with phosphorothioate linkage
  modified_base 12: mod_base = OTHER; note = Nucleotide with phosphorothioate linkage
  modified_base 13: mod_base = OTHER; note = Nucleotide with phosphorothioate linkage
  modified_base 14: mod_base = OTHER; note = Nucleotide with phosphorothioate linkage
  modified_base 15: mod_base = OTHER; note = Nucleotide with phosphorothioate linkage
  modified_base 16: mod_base = OTHER; note = beta-D-oxy locked nucleotide with phosphorothioate linkage
  modified_base 17: mod_base = OTHER; note = beta-D-oxy locked nucleotide with phosphorothioate linkage
ttaggacctactttata

SEQ ID NO: 364 - DNA, 16 bp, synthetic construct
  source 1..16: mol_type = other DNA
  modified_base 1: mod_base = OTHER; note = beta-D-oxy locked nucleotide with phosphorothioate linkage
  modified_base 2: mod_base = OTHER; note = beta-D-oxy locked nucleotide with phosphorothioate linkage
  modified_base 3: mod_base = OTHER; note = 5-methyl beta-D-oxy locked nucleotide with phosphorothioate linkage
  modified_base 4: mod_base = OTHER; note = Nucleotide with phosphorothioate linkage
  modified_base 5: mod_base = OTHER; note = Nucleotide with phosphorothioate linkage
  modified_base 6: mod_base = OTHER; note = Nucleotide with phosphorothioate linkage
  modified_base 7: mod_base = OTHER; note = Nucleotide with phosphorothioate linkage
  modified_base 8: mod_base = OTHER; note = Nucleotide with phosphorothioate linkage
  modified_base 9: mod_base = OTHER; note = Nucleotide with phosphorothioate linkage
  modified_base 10: mod_base = OTHER; note = Nucleotide with phosphorothioate linkage
  modified_base 11: mod_base = OTHER; note = Nucleotide with phosphorothioate linkage
  modified_base 12: mod_base = OTHER; note = Nucleotide with phosphorothioate linkage
  modified_base 13: mod_base = OTHER; note = Nucleotide with phosphorothioate linkage
  modified_base 14: mod_base = OTHER; note = 5-methyl beta-D-oxy locked nucleotide with phosphorothioate linkage
  modified_base 15: mod_base = OTHER; note = 5-methyl beta-D-oxy locked nucleotide with phosphorothioate linkage
  modified_base 16: mod_base = OTHER; note = beta-D-oxy locked nucleotide with phosphorothioate linkage
aactatacaacaccct

SEQ ID NO: 365 - DNA, 19 bp, synthetic construct
  source 1..19: mol_type = other DNA
  modified_base 1: mod_base = OTHER; note = beta-D-oxy locked nucleotide with phosphorothioate linkage
  modified_base 2: mod_base = OTHER; note = beta-D-oxy locked nucleotide with phosphorothioate linkage
  modified_base 3: mod_base = OTHER; note = 5-methyl beta-D-oxy locked nucleotide with phosphorothioate linkage
  modified_base 4: mod_base = OTHER; note = beta-D-oxy locked nucleotide with phosphorothioate linkage
  modified_base 5: mod_base = OTHER; note = Nucleotide with phosphorothioate linkage
  modified_base 6: mod_base = OTHER; note = Nucleotide with phosphorothioate linkage
  modified_base 7: mod_base = OTHER; note = Nucleotide with phosphorothioate linkage
  modified_base 8: mod_base = OTHER; note = Nucleotide with phosphorothioate linkage
  modified_base 9: mod_base = OTHER; note = Nucleotide with phosphorothioate linkage
  modified_base 10: mod_base = OTHER; note = Nucleotide with phosphorothioate linkage
  modified_base 11: mod_base = OTHER; note = Nucleotide with phosphorothioate linkage
  modified_base 12: mod_base = OTHER; note = Nucleotide with phosphorothioate linkage
  modified_base 13: mod_base = OTHER; note = Nucleotide with phosphorothioate linkage
  modified_base 14: mod_base = OTHER; note = Nucleotide with phosphorothioate linkage
  modified_base 15: mod_base = OTHER; note = Nucleotide with phosphorothioate linkage
  modified_base 16: mod_base = OTHER; note = Nucleotide with phosphorothioate linkage
  modified_base 17: mod_base = OTHER; note = Nucleotide with phosphorothioate linkage
  modified_base 18: mod_base = OTHER; note = 5-methyl beta-D-oxy locked nucleotide with phosphorothioate linkage
  modified_base 19: mod_base = OTHER; note = 5-methyl beta-D-oxy locked nucleotide with phosphorothioate linkage
tacaaactatacaacaccc

SEQ ID NO: 366 - DNA, 19 bp, synthetic construct
  source 1..19: mol_type = other DNA
  modified_base 1: mod_base = OTHER; note = beta-D-oxy locked nucleotide with phosphorothioate linkage
  modified_base 2: mod_base = OTHER; note = beta-D-oxy locked nucleotide with phosphorothioate linkage
  modified_base 3: mod_base = OTHER; note = Nucleotide with phosphorothioate linkage
  modified_base 4: mod_base = OTHER; note = Nucleotide with phosphorothioate linkage
  modified_base 5: mod_base = OTHER; note = Nucleotide with phosphorothioate linkage
  modified_base 6: mod_base = OTHER; note = Nucleotide with phosphorothioate linkage
  modified_base 7: mod_base = OTHER; note = Nucleotide with phosphorothioate linkage
  modified_base 8: mod_base = OTHER; note = Nucleotide with phosphorothioate linkage
  modified_base 9: mod_base = OTHER; note = Nucleotide with phosphorothioate linkage
  modified_base 10: mod_base = OTHER; note = Nucleotide with phosphorothioate linkage
  modified_base 11: mod_base = OTHER; note = Nucleotide with phosphorothioate linkage
  modified_base 12: mod_base = OTHER; note = Nucleotide with phosphorothioate linkage
  modified_base 13: mod_base = OTHER; note = Nucleotide with phosphorothioate linkage
  modified_base 14: mod_base = OTHER; note = Nucleotide with phosphorothioate linkage
  modified_base 15: mod_base = OTHER; note = Nucleotide with phosphorothioate linkage
  modified_base 16: mod_base = OTHER; note = Nucleotide with phosphorothioate linkage
  modified_base 17: mod_base = OTHER; note = Nucleotide with phosphorothioate linkage
  modified_base 18: mod_base = OTHER; note = 5-methyl beta-D-oxy locked nucleotide with phosphorothioate linkage
  modified_base 19: mod_base = OTHER; note = 5-methyl beta-D-oxy locked nucleotide with phosphorothioate linkage
gtacaaactatacaacacc

SEQ ID NO: 367 - DNA, 15 bp, synthetic construct
  source 1..15: mol_type = other DNA
  modified_base 1: mod_base = OTHER; note = beta-D-oxy locked nucleotide with phosphorothioate linkage
  modified_base 2: mod_base = OTHER; note = 5-methyl beta-D-oxy locked nucleotide with phosphorothioate linkage
  modified_base 3: mod_base = OTHER; note = beta-D-oxy locked nucleotide with phosphorothioate linkage
  modified_base 4: mod_base = OTHER; note = beta-D-oxy locked nucleotide with phosphorothioate linkage
  modified_base 5: mod_base = OTHER; note = Nucleotide with phosphorothioate linkage
  modified_base 6: mod_base = OTHER; note = Nucleotide with phosphorothioate linkage
  modified_base 7: mod_base = OTHER; note = Nucleotide with phosphorothioate linkage
  modified_base 8: mod_base = OTHER; note = Nucleotide with phosphorothioate linkage
  modified_base 9: mod_base = OTHER; note = Nucleotide with phosphorothioate linkage
  modified_base 10: mod_base = OTHER; note = Nucleotide with phosphorothioate linkage
  modified_base 11: mod_base = OTHER; note = Nucleotide with phosphorothioate linkage
  modified_base 12: mod_base = OTHER; note = beta-D-oxy locked nucleotide with phosphorothioate linkage
  modified_base 13: mod_base = OTHER; note = beta-D-oxy locked nucleotide with phosphorothioate linkage
  modified_base 14: mod_base = OTHER; note = beta-D-oxy locked nucleotide with phosphorothioate linkage
  modified_base 15: mod_base = OTHER; note = 5-methyl beta-D-oxy locked nucleotide with phosphorothioate linkage
gcgtacaaactatac

SEQ ID NO: 368 - DNA, 15 bp, synthetic construct
  source 1..15: mol_type = other DNA
  modified_base 1: mod_base = OTHER; note = beta-D-oxy locked nucleotide with phosphorothioate linkage
  modified_base 2: mod_base = OTHER; note = beta-D-oxy locked nucleotide with phosphorothioate linkage
  modified_base 3: mod_base = OTHER; note = beta-D-oxy locked nucleotide with phosphorothioate linkage
  modified_base 4: mod_base = OTHER; note = Nucleotide with phosphorothioate linkage
  modified_base 5: mod_base = OTHER; note = Nucleotide with phosphorothioate linkage
  modified_base 6: mod_base = OTHER; note = Nucleotide with phosphorothioate linkage
  modified_base 7: mod_base = OTHER; note = Nucleotide with phosphorothioate linkage
  modified_base 8: mod_base = OTHER; note = Nucleotide with phosphorothioate linkage
  modified_base 9: mod_base = OTHER; note = Nucleotide with phosphorothioate linkage
  modified_base 10: mod_base = OTHER; note = Nucleotide with phosphorothioate linkage
  modified_base 11: mod_base = OTHER; note = Nucleotide with phosphorothioate linkage
  modified_base 12: mod_base = OTHER; note = 5-methyl beta-D-oxy locked nucleotide with phosphorothioate linkage
  modified_base 13: mod_base = OTHER; note = beta-D-oxy locked nucleotide with phosphorothioate linkage
  modified_base 14: mod_base = OTHER; note = beta-D-oxy locked nucleotide with phosphorothioate linkage
  modified_base 15: mod_base = OTHER; note = beta-D-oxy locked nucleotide with phosphorothioate linkage
ttgcgtacaaactat

SEQ ID NO: 369 - DNA, 17 bp, synthetic construct
  source 1..17: mol_type = other DNA
  modified_base 1: mod_base = OTHER; note = 5-methyl beta-D-oxy locked nucleotide with phosphorothioate linkage
  modified_base 2: mod_base = OTHER; note = beta-D-oxy locked nucleotide with phosphorothioate linkage
  modified_base 3: mod_base = OTHER; note = 5-methyl beta-D-oxy locked nucleotide with phosphorothioate linkage
  modified_base 4: mod_base = OTHER; note = 5-methyl beta-D-oxy locked nucleotide with phosphorothioate linkage
  modified_base 5: mod_base = OTHER; note = Nucleotide with phosphorothioate linkage
  modified_base 6: mod_base = OTHER; note = Nucleotide with phosphorothioate linkage
  modified_base 7: mod_base = OTHER; note = Nucleotide with phosphorothioate linkage
  modified_base 8: mod_base = OTHER; note = Nucleotide with phosphorothioate linkage
  modified_base 9: mod_base = OTHER; note = Nucleotide with phosphorothioate linkage
  modified_base 10: mod_base = OTHER; note = Nucleotide with phosphorothioate linkage
  modified_base 11: mod_base = OTHER; note = Nucleotide with phosphorothioate linkage
  modified_base 12: mod_base = OTHER; note = Nucleotide with phosphorothioate linkage
  modified_base 13: mod_base = OTHER; note = Nucleotide with phosphorothioate linkage
  modified_base 14: mod_base = OTHER; note = Nucleotide with phosphorothioate linkage
  modified_base 15: mod_base = OTHER; note = Nucleotide with phosphorothioate linkage
  modified_base 16: mod_base = OTHER; note = beta-D-oxy locked nucleotide with phosphorothioate linkage
  modified_base 17: mod_base = OTHER; note = beta-D-oxy locked nucleotide with phosphorothioate linkage
caccatgaaaaccctat

SEQ ID NO: 370 - DNA, 18 bp, synthetic construct
  source 1..18: mol_type = other DNA
  modified_base 1: mod_base = OTHER; note = beta-D-oxy locked nucleotide with phosphorothioate linkage
  modified_base 2: mod_base = OTHER; note = beta-D-oxy locked nucleotide with phosphorothioate linkage
  modified_base 3: mod_base = OTHER; note = beta-D-oxy locked nucleotide with phosphorothioate linkage
  modified_base 4: mod_base = OTHER; note = 5-methyl beta-D-oxy locked nucleotide with phosphorothioate linkage
  modified_base 5: mod_base = OTHER; note = Nucleotide with phosphorothioate linkage
  modified_base 6: mod_base = OTHER; note = Nucleotide with phosphorothioate linkage
  modified_base 7: mod_base = OTHER; note = Nucleotide with phosphorothioate linkage
  modified_base 8: mod_base = OTHER; note = Nucleotide with phosphorothioate linkage
  modified_base 9: mod_base = OTHER; note = Nucleotide with phosphorothioate linkage
  modified_base 10: mod_base = OTHER; note = Nucleotide with phosphorothioate linkage
  modified_base 11: mod_base = OTHER; note = Nucleotide with phosphorothioate linkage
  modified_base 12: mod_base = OTHER; note = Nucleotide with phosphorothioate linkage
  modified_base 13: mod_base = OTHER; note = Nucleotide with phosphorothioate linkage
  modified_base 14: mod_base = OTHER; note = Nucleotide with phosphorothioate linkage
  modified_base 15: mod_base = OTHER; note = beta-D-oxy locked nucleotide with phosphorothioate linkage
  modified_base 16: mod_base = OTHER; note = beta-D-oxy locked nucleotide with phosphorothioate linkage
  modified_base 17: mod_base = OTHER; note = 5-methyl beta-D-oxy locked nucleotide with phosphorothioate linkage
  modified_base 18: mod_base = OTHER; note = beta-D-oxy locked nucleotide with phosphorothioate linkage
aatctaaactacttttct

SEQ ID NO: 371 - DNA, 20 bp, synthetic construct
  source 1..20: mol_type = other DNA
  modified_base 1: mod_base = OTHER; note = beta-D-oxy locked nucleotide with phosphorothioate linkage
  modified_base 2: mod_base = OTHER; note = beta-D-oxy locked nucleotide with phosphorothioate linkage
  modified_base 3: mod_base = OTHER; note = beta-D-oxy locked nucleotide with phosphorothioate linkage
  modified_base 4: mod_base = OTHER; note = 5-methyl beta-D-oxy locked nucleotide with phosphorothioate linkage
  modified_base 5: mod_base = OTHER; note = Nucleotide with phosphorothioate linkage
  modified_base 6: mod_base = OTHER; note = Nucleotide with phosphorothioate linkage
  modified_base 7: mod_base = OTHER; note = Nucleotide with phosphorothioate linkage
  modified_base 8: mod_base = OTHER; note = Nucleotide with phosphorothioate linkage
  modified_base 9: mod_base = OTHER; note = Nucleotide with phosphorothioate linkage
  modified_base 10: mod_base = OTHER; note = Nucleotide with phosphorothioate linkage
  modified_base 11: mod_base = OTHER; note = Nucleotide with phosphorothioate linkage
  modified_base 12: mod_base = OTHER; note = Nucleotide with phosphorothioate linkage
  modified_base 13: mod_base = OTHER; note = Nucleotide with phosphorothioate linkage
  modified_base 14: mod_base = OTHER; note = Nucleotide with phosphorothioate linkage
  modified_base 15: mod_base = OTHER; note = Nucleotide with phosphorothioate linkage
  modified_base 16: mod_base = OTHER; note = Nucleotide with phosphorothioate linkage
  modified_base 17: mod_base = OTHER; note = beta-D-oxy locked nucleotide with phosphorothioate linkage
  modified_base 18: mod_base = OTHER; note = beta-D-oxy locked nucleotide with phosphorothioate linkage
  modified_base 19: mod_base = OTHER; note = beta-D-oxy locked nucleotide with phosphorothioate linkage
  modified_base 20: mod_base = OTHER; note = beta-D-oxy locked nucleotide with phosphorothioate linkage
atacaatctaaactactttt

SEQ ID NO: 372 - DNA, 19 bp, synthetic construct
  source 1..19: mol_type = other DNA
  modified_base 1: mod_base = OTHER; note = beta-D-oxy locked nucleotide with phosphorothioate linkage
  modified_base 2: mod_base = OTHER; note = beta-D-oxy locked nucleotide with phosphorothioate linkage
  modified_base 3: mod_base = OTHER; note = beta-D-oxy locked nucleotide with phosphorothioate linkage
  modified_base 4: mod_base = OTHER; note = beta-D-oxy locked nucleotide with phosphorothioate linkage
  modified_base 5: mod_base = OTHER; note = Nucleotide with phosphorothioate linkage
  modified_base 6: mod_base = OTHER; note = Nucleotide with phosphorothioate linkage
  modified_base 7: mod_base = OTHER; note = Nucleotide with phosphorothioate linkage
  modified_base 8: mod_base = OTHER; note = Nucleotide with phosphorothioate linkage
  modified_base 9: mod_base = OTHER; note = Nucleotide with phosphorothioate linkage
  modified_base 10: mod_base = OTHER; note = Nucleotide with phosphorothioate linkage
  modified_base 11: mod_base = OTHER; note = Nucleotide with phosphorothioate linkage
  modified_base 12: mod_base = OTHER; note = Nucleotide with phosphorothioate linkage
  modified_base 13: mod_base = OTHER; note = Nucleotide with phosphorothioate linkage
  modified_base 14: mod_base = OTHER; note = Nucleotide with phosphorothioate linkage
  modified_base 15: mod_base = OTHER; note = Nucleotide with phosphorothioate linkage
  modified_base 16: mod_base = OTHER; note = Nucleotide with phosphorothioate linkage
  modified_base 17: mod_base = OTHER; note = beta-D-oxy locked nucleotide with phosphorothioate linkage
  modified_base 18: mod_base = OTHER; note = 5-methyl beta-D-oxy locked nucleotide with phosphorothioate linkage
  modified_base 19: mod_base = OTHER; note = beta-D-oxy locked nucleotide with phosphorothioate linkage
gaatacaatctaaactact

SEQ ID NO: 373 - DNA, 16 bp, synthetic construct
  source 1..16: mol_type = other DNA
  modified_base 1: mod_base = OTHER; note = beta-D-oxy locked nucleotide with phosphorothioate linkage
  modified_base 2: mod_base = OTHER; note = beta-D-oxy locked nucleotide with phosphorothioate linkage
  modified_base 3: mod_base = OTHER; note = 5-methyl beta-D-oxy locked nucleotide with phosphorothioate linkage
  modified_base 4: mod_base = OTHER; note = beta-D-oxy locked nucleotide with phosphorothioate linkage
  modified_base 5: mod_base = OTHER; note = Nucleotide with phosphorothioate linkage
  modified_base 6: mod_base = OTHER; note = Nucleotide with phosphorothioate linkage
  modified_base 7: mod_base = OTHER; note = Nucleotide with phosphorothioate linkage
  modified_base 8: mod_base = OTHER; note = Nucleotide with phosphorothioate linkage
  modified_base 9: mod_base = OTHER; note = Nucleotide with phosphorothioate linkage
  modified_base 10: mod_base = OTHER; note = Nucleotide with phosphorothioate linkage
  modified_base 11: mod_base = OTHER; note = Nucleotide with phosphorothioate linkage
  modified_base 12: mod_base = OTHER; note = Nucleotide with phosphorothioate linkage
  modified_base 13: mod_base = OTHER; note = 5-methyl beta-D-oxy locked nucleotide with phosphorothioate linkage
  modified_base 14: mod_base = OTHER; note = beta-D-oxy locked nucleotide with phosphorothioate linkage
  modified_base 15: mod_base = OTHER; note = beta-D-oxy locked nucleotide with phosphorothioate linkage
  modified_base 16: mod_base = OTHER; note = beta-D-oxy locked nucleotide with phosphorothioate linkage
tacgaatacaatctaa

SEQ ID NO: 374 - DNA, 15 bp, synthetic construct
  source 1..15: mol_type = other DNA
  modified_base 1: mod_base = OTHER; note = beta-D-oxy locked nucleotide with phosphorothioate linkage
  modified_base 2: mod_base = OTHER; note = 5-methyl beta-D-oxy locked nucleotide with phosphorothioate linkage
  modified_base 3: mod_base = OTHER; note = beta-D-oxy locked nucleotide with phosphorothioate linkage
  modified_base 4: mod_base = OTHER; note = beta-D-oxy locked nucleotide with phosphorothioate linkage
  modified_base 5: mod_base = OTHER; note = Nucleotide with phosphorothioate linkage
  modified_base 6: mod_base = OTHER; note = Nucleotide with phosphorothioate linkage
  modified_base 7: mod_base = OTHER; note = Nucleotide with phosphorothioate linkage
  modified_base 8: mod_base = OTHER; note = Nucleotide with phosphorothioate linkage
  modified_base 9: mod_base = OTHER; note = Nucleotide with phosphorothioate linkage
  modified_base 10: mod_base = OTHER; note = Nucleotide with phosphorothioate linkage
  modified_base 11: mod_base = OTHER; note = Nucleotide with phosphorothioate linkage
  modified_base 12: mod_base = OTHER; note = beta-D-oxy locked nucleotide with phosphorothioate linkage
  modified_base 13: mod_base = OTHER; note = beta-D-oxy locked nucleotide with phosphorothioate linkage
  modified_base 14: mod_base = OTHER; note = beta-D-oxy locked nucleotide with phosphorothioate linkage
  modified_base 15: mod_base = OTHER; note = 5-methyl beta-D-oxy locked nucleotide with phosphorothioate linkage
tctacgaatacaatc

SEQ ID NO: 375 - DNA, 19 bp, synthetic construct
  source 1..19: mol_type = other DNA
  modified_base 1: mod_base = OTHER; note = 5-methyl beta-D-oxy locked nucleotide with phosphorothioate linkage
  modified_base 2: mod_base = OTHER; note = 5-methyl beta-D-oxy locked nucleotide with phosphorothioate linkage
  modified_base 3: mod_base = OTHER; note = Nucleotide with phosphorothioate linkage
  modified_base 4: mod_base = OTHER; note = Nucleotide with phosphorothioate linkage
  modified_base 5: mod_base = OTHER; note = Nucleotide with phosphorothioate linkage
  modified_base 6: mod_base = OTHER; note = Nucleotide with phosphorothioate linkage
  modified_base 7: mod_base = OTHER; note = Nucleotide with phosphorothioate linkage
  modified_base 8: mod_base = OTHER; note = Nucleotide with phosphorothioate linkage
  modified_base 9: mod_base = OTHER; note = Nucleotide with phosphorothioate linkage
  modified_base 10: mod_base = OTHER; note = Nucleotide with phosphorothioate linkage
  modified_base 11: mod_base = OTHER; note = Nucleotide with phosphorothioate linkage
  modified_base 12: mod_base = OTHER; note = Nucleotide with phosphorothioate linkage
  modified_base 13: mod_base = OTHER; note = Nucleotide with phosphorothioate linkage
  modified_base 14: mod_base = OTHER; note = Nucleotide with phosphorothioate linkage
  modified_base 15: mod_base = OTHER; note = Nucleotide with phosphorothioate linkage
  modified_base 16: mod_base = OTHER; note = Nucleotide with phosphorothioate linkage
  modified_base 17: mod_base = OTHER; note = beta-D-oxy locked nucleotide with phosphorothioate linkage
  modified_base 18: mod_base = OTHER; note = beta-D-oxy locked nucleotide with phosphorothioate linkage
  modified_base 19: mod_base = OTHER; note = 5-methyl beta-D-oxy locked nucleotide with phosphorothioate linkage
cccatattttaaaatctac

SEQ ID NO: 376 - DNA, 18 bp, synthetic construct
  source 1..18: mol_type = other DNA
  modified_base 1: mod_base = OTHER; note = 5-methyl beta-D-oxy locked nucleotide with phosphorothioate linkage
  modified_base 2: mod_base = OTHER; note = 5-methyl beta-D-oxy locked nucleotide with phosphorothioate linkage
  modified_base 3: mod_base = OTHER; note = Nucleotide with phosphorothioate linkage
  modified_base 4: mod_base = OTHER; note = Nucleotide with phosphorothioate linkage
  modified_base 5: mod_base = OTHER; note = Nucleotide with phosphorothioate linkage
  modified_base 6: mod_base = OTHER; note = Nucleotide with phosphorothioate linkage
  modified_base 7: mod_base = OTHER; note = Nucleotide with phosphorothioate linkage
  modified_base 8: mod_base = OTHER; note = Nucleotide with phosphorothioate linkage
  modified_base 9: mod_base = OTHER; note = Nucleotide with phosphorothioate linkage
  modified_base 10: mod_base = OTHER; note = Nucleotide with phosphorothioate linkage
  modified_base 11: mod_base = OTHER; note = Nucleotide with phosphorothioate linkage
  modified_base 12: mod_base = OTHER; note = Nucleotide with phosphorothioate linkage
  modified_base 13: mod_base = OTHER; note = Nucleotide with phosphorothioate linkage
  modified_base 14: mod_base = OTHER; note = Nucleotide with phosphorothioate linkage
  modified_base 15: mod_base = OTHER; note = beta-D-oxy locked nucleotide with phosphorothioate linkage
  modified_base 16: mod_base = OTHER; note = 5-methyl beta-D-oxy locked nucleotide with phosphorothioate linkage
  modified_base 17: mod_base = OTHER; note = beta-D-oxy locked nucleotide with phosphorothioate linkage
  modified_base 18: mod_base = OTHER; note = beta-D-oxy locked nucleotide with phosphorothioate linkage
cccatattttaaaatcta

SEQ ID NO: 377 - DNA, 19 bp, synthetic construct
  source 1..19: mol_type = other DNA
  modified_base 1: mod_base = OTHER; note = beta-D-oxy locked nucleotide with phosphorothioate linkage
  modified_base 2: mod_base = OTHER; note = beta-D-oxy locked nucleotide with phosphorothioate linkage
  modified_base 3: mod_base = OTHER; note = beta-D-oxy locked nucleotide with phosphorothioate linkage
  modified_base 4: mod_base = OTHER; note = beta-D-oxy locked nucleotide with phosphorothioate linkage
  modified_base 5: mod_base = OTHER; note = Nucleotide with phosphorothioate linkage
  modified_base 6: mod_base = OTHER; note = Nucleotide with phosphorothioate linkage
  modified_base 7: mod_base = OTHER; note = Nucleotide with phosphorothioate linkage
  modified_base 8: mod_base = OTHER; note = Nucleotide with phosphorothioate linkage
  modified_base 9: mod_base = OTHER; note = Nucleotide with phosphorothioate linkage
  modified_base 10: mod_base = OTHER; note = Nucleotide with phosphorothioate linkage
  modified_base 11: mod_base = OTHER; note = Nucleotide with phosphorothioate linkage
  modified_base 12: mod_base = OTHER; note = Nucleotide with phosphorothioate linkage
  modified_base 13: mod_base = OTHER; note = Nucleotide with phosphorothioate linkage
  modified_base 14: mod_base = OTHER; note = Nucleotide with phosphorothioate linkage
  modified_base 15: mod_base = OTHER; note = Nucleotide with phosphorothioate linkage
  modified_base 16: mod_base = OTHER; note = beta-D-oxy locked nucleotide with phosphorothioate linkage
  modified_base 17: mod_base = OTHER; note = 5-methyl beta-D-oxy locked nucleotide with phosphorothioate linkage
  modified_base 18: mod_base = OTHER; note = beta-D-oxy locked nucleotide with phosphorothioate linkage
  modified_base 19: mod_base = OTHER; note = beta-D-oxy locked nucleotide with phosphorothioate linkage
ttgatattttatactacat

SEQ ID NO: 378 - DNA, 19 bp, synthetic construct
  source 1..19: mol_type = other DNA
  modified_base 1: mod_base = OTHER; note = beta-D-oxy locked nucleotide with phosphorothioate linkage
  modified_base 2: mod_base = OTHER; note = beta-D-oxy locked nucleotide with phosphorothioate linkage
  modified_base 3: mod_base = OTHER; note = beta-D-oxy locked nucleotide with phosphorothioate linkage
  modified_base 4: mod_base = OTHER; note = beta-D-oxy locked nucleotide with phosphorothioate linkage
  modified_base 5: mod_base = OTHER; note = Nucleotide with phosphorothioate linkage
  modified_base 6: mod_base = OTHER; note = Nucleotide with phosphorothioate linkage
  modified_base 7: mod_base = OTHER; note = Nucleotide with phosphorothioate linkage
  modified_base 8: mod_base = OTHER; note = Nucleotide with phosphorothioate linkage
  modified_base 9: mod_base = OTHER; note = Nucleotide with phosphorothioate linkage
  modified_base 10: mod_base = OTHER; note = Nucleotide with phosphorothioate linkage
  modified_base 11: mod_base = OTHER; note = Nucleotide with phosphorothioate linkage
  modified_base 12: mod_base = OTHER; note = Nucleotide with phosphorothioate linkage
  modified_base 13: mod_base = OTHER; note = Nucleotide with phosphorothioate linkage
  modified_base 14: mod_base = OTHER; note = Nucleotide with phosphorothioate linkage
  modified_base 15: mod_base = OTHER; note = Nucleotide with phosphorothioate linkage
  modified_base 16: mod_base = OTHER; note = beta-D-oxy locked nucleotide with phosphorothioate linkage
  modified_base 17: mod_base = OTHER; note = beta-D-oxy locked nucleotide with phosphorothioate linkage
  modified_base 18: mod_base = OTHER; note = beta-D-oxy locked nucleotide with phosphorothioate linkage
  modified_base 19: mod_base = OTHER; note = beta-D-oxy locked nucleotide with phosphorothioate linkage
taaatcttaacacacttta

SEQ ID NO: 379 - DNA, 18 bp, synthetic construct
  source 1..18: mol_type = other DNA
  modified_base 1: mod_base = OTHER; note = beta-D-oxy locked nucleotide with phosphorothioate linkage
  modified_base 2: mod_base = OTHER; note = beta-D-oxy locked nucleotide with phosphorothioate linkage
  modified_base 3: mod_base = OTHER; note = beta-D-oxy locked nucleotide with phosphorothioate linkage
  modified_base 4: mod_base = OTHER; note = beta-D-oxy locked nucleotide with phosphorothioate linkage
  modified_base 5: mod_base = OTHER; note = Nucleotide with phosphorothioate linkage
  modified_base 6: mod_base = OTHER; note = Nucleotide with phosphorothioate linkage
  modified_base 7: mod_base = OTHER; note = Nucleotide with phosphorothioate linkage
  modified_base 8: mod_base = OTHER; note = Nucleotide with phosphorothioate linkage
  modified_base 9: mod_base = OTHER; note = Nucleotide with phosphorothioate linkage
  modified_base 10: mod_base = OTHER; note = Nucleotide with phosphorothioate linkage
  modified_base 11: mod_base = OTHER; note = Nucleotide with phosphorothioate linkage
  modified_base 12: mod_base = OTHER; note = Nucleotide with phosphorothioate linkage
  modified_base 13: mod_base = OTHER; note = Nucleotide with phosphorothioate linkage
  modified_base 14: mod_base = OTHER; note = Nucleotide with phosphorothioate linkage
  modified_base 15: mod_base = OTHER; note = 5-methyl beta-D-oxy locked nucleotide with phosphorothioate linkage
  modified_base 16: mod_base = OTHER; note = beta-D-oxy locked nucleotide with phosphorothioate linkage
  modified_base 17: mod_base = OTHER; note = beta-D-oxy locked nucleotide with phosphorothioate linkage
  modified_base 18: mod_base = OTHER; note = beta-D-oxy locked nucleotide with phosphorothioate linkage
taaatcttaacacacttt

SEQ ID NO: 380 - DNA, 19 bp, synthetic construct
  source 1..19: mol_type = other DNA
  modified_base 1: mod_base = OTHER; note = beta-D-oxy locked nucleotide with phosphorothioate linkage
  modified_base 2: mod_base = OTHER; note = beta-D-oxy locked nucleotide with phosphorothioate linkage
  modified_base 3: mod_base = OTHER; note = beta-D-oxy locked nucleotide with phosphorothioate linkage
  modified_base 4: mod_base = OTHER; note = beta-D-oxy locked nucleotide with phosphorothioate linkage
  modified_base 5: mod_base = OTHER; note = Nucleotide with phosphorothioate linkage
  modified_base 6: mod_base = OTHER; note = Nucleotide with phosphorothioate linkage
  modified_base 7: mod_base = OTHER; note = Nucleotide with phosphorothioate linkage
  modified_base 8: mod_base = OTHER; note = Nucleotide with phosphorothioate linkage
  modified_base 9: mod_base = OTHER; note = Nucleotide with phosphorothioate linkage
  modified_base 10: mod_base = OTHER; note = Nucleotide with phosphorothioate linkage
  modified_base 11: mod_base = OTHER; note = Nucleotide with phosphorothioate linkage
  modified_base 12: mod_base = OTHER; note = Nucleotide with phosphorothioate linkage
  modified_base 13: mod_base = OTHER; note = Nucleotide with phosphorothioate linkage
  modified_base 14: mod_base = OTHER; note = Nucleotide with phosphorothioate linkage
  modified_base 15: mod_base = OTHER; note = Nucleotide with phosphorothioate linkage
  modified_base 16: mod_base = OTHER; note = 5-methyl beta-D-oxy locked nucleotide with phosphorothioate linkage
  modified_base 17: mod_base = OTHER; note = beta-D-oxy locked nucleotide with phosphorothioate linkage
  modified_base 18: mod_base = OTHER; note = 5-methyl beta-D-oxy locked nucleotide with phosphorothioate linkage
  modified_base 19: mod_base = OTHER; note = beta-D-oxy locked nucleotide with phosphorothioate linkage
aaataaatcttaacacact

SEQ ID NO: 381 - DNA, 21 bp, synthetic construct
  source 1..21: mol_type = other DNA
  modified_base 1: mod_base = OTHER; note = beta-D-oxy locked nucleotide with phosphorothioate linkage
  modified_base 2: mod_base = OTHER; note = beta-D-oxy locked nucleotide with phosphorothioate linkage
  modified_base 3: mod_base = OTHER; note = beta-D-oxy locked nucleotide with phosphorothioate linkage
  modified_base 4: mod_base = OTHER; note = Nucleotide with phosphorothioate linkage
  modified_base 5: mod_base = OTHER; note = Nucleotide with phosphorothioate linkage
  modified_base 6: mod_base = OTHER; note = Nucleotide with phosphorothioate linkage
  modified_base 7: mod_base = OTHER; note = Nucleotide with phosphorothioate linkage
  modified_base 8: mod_base = OTHER; note = Nucleotide with phosphorothioate linkage
  modified_base 9: mod_base = OTHER; note = Nucleotide with phosphorothioate linkage
  modified_base 10: mod_base = OTHER; note = Nucleotide with phosphorothioate linkage
  modified_base 11: mod_base = OTHER; note = Nucleotide with phosphorothioate linkage
  modified_base 12: mod_base = OTHER; note = Nucleotide with phosphorothioate linkage
  modified_base 13: mod_base = OTHER; note = Nucleotide with phosphorothioate linkage
  modified_base 14: mod_base = OTHER; note = Nucleotide with phosphorothioate linkage
  modified_base 15: mod_base = OTHER; note = Nucleotide with phosphorothioate linkage
  modified_base 16: mod_base = OTHER; note = Nucleotide with phosphorothioate linkage
  modified_base 17: mod_base = OTHER; note = Nucleotide with phosphorothioate linkage
  modified_base 18: mod_base = OTHER; note = 5-methyl beta-D-oxy locked nucleotide with phosphorothioate linkage
  modified_base 19: mod_base = OTHER; note = beta-D-oxy locked nucleotide with phosphorothioate linkage
  modified_base 20: mod_base = OTHER; note = 5-methyl beta-D-oxy locked nucleotide with phosphorothioate linkage
  modified_base 21: mod_base = OTHER; note = beta-D-oxy locked nucleotide with phosphorothioate linkage
taaaataaatcttaacacact

SEQ ID NO: 382 - DNA, 18 bp, synthetic construct
  source 1..18: mol_type = other DNA
  modified_base 1: mod_base = OTHER; note = beta-D-oxy locked nucleotide with phosphorothioate linkage
  modified_base 2: mod_base = OTHER; note = beta-D-oxy locked nucleotide with phosphorothioate linkage
  modified_base 3: mod_base = OTHER; note = 5-methyl beta-D-oxy locked nucleotide with phosphorothioate linkage
  modified_base 4: mod_base = OTHER; note = Nucleotide with phosphorothioate linkage
  modified_base 5: mod_base = OTHER; note = Nucleotide with phosphorothioate linkage
  modified_base 6: mod_base = OTHER; note = Nucleotide with phosphorothioate linkage
  modified_base 7: mod_base = OTHER; note = Nucleotide with phosphorothioate linkage
  modified_base 8: mod_base = OTHER; note = Nucleotide with phosphorothioate linkage
  modified_base 9: mod_base = OTHER; note = Nucleotide with phosphorothioate linkage
  modified_base 10: mod_base = OTHER; note = Nucleotide with phosphorothioate linkage
  modified_base 11: mod_base = OTHER; note = Nucleotide with phosphorothioate linkage
  modified_base 12: mod_base = OTHER; note = Nucleotide with phosphorothioate linkage
  modified_base 13: mod_base = OTHER; note = Nucleotide with phosphorothioate linkage
  modified_base 14: mod_base = OTHER; note = Nucleotide with phosphorothioate linkage
  modified_base 15: mod_base = OTHER; note = Nucleotide with phosphorothioate linkage
  modified_base 16: mod_base = OTHER; note = Nucleotide with phosphorothioate linkage
  modified_base 17: mod_base = OTHER; note = beta-D-oxy locked nucleotide with phosphorothioate linkage
  modified_base 18: mod_base = OTHER; note = 5-methyl beta-D-oxy locked nucleotide with phosphorothioate linkage
agcaagcaaaacacctac

SEQ ID NO: 383 - DNA, 16 bp, synthetic construct
  source 1..16: mol_type = other DNA
  modified_base 1: mod_base = OTHER; note = beta-D-oxy locked nucleotide with phosphorothioate linkage
  modified_base 2: mod_base = OTHER; note = 5-methyl beta-D-oxy locked nucleotide with phosphorothioate linkage
  modified_base 3: mod_base = OTHER; note = Nucleotide with phosphorothioate linkage
  modified_base 4: mod_base = OTHER; note = Nucleotide with phosphorothioate linkage
  modified_base 5: mod_base = OTHER; note = Nucleotide with phosphorothioate linkage
  modified_base 6: mod_base = OTHER; note = Nucleotide with phosphorothioate linkage
  modified_base 7: mod_base = OTHER; note = Nucleotide with phosphorothioate linkage
  modified_base 8: mod_base = OTHER; note = Nucleotide with phosphorothioate linkage
  modified_base 9: mod_base = OTHER; note = Nucleotide with phosphorothioate linkage
  modified_base 10: mod_base = OTHER; note = Nucleotide with phosphorothioate linkage
  modified_base 11: mod_base = OTHER; note = Nucleotide with phosphorothioate linkage
  modified_base 12: mod_base = OTHER; note = Nucleotide with phosphorothioate linkage
  modified_base 13: mod_base = OTHER; note = Nucleotide with phosphorothioate linkage
  modified_base 14: mod_base = OTHER; note = Nucleotide with phosphorothioate linkage
  modified_base 15: mod_base = OTHER; note = beta-D-oxy locked nucleotide with phosphorothioate linkage
  modified_base 16: mod_base = OTHER; note = beta-D-oxy locked nucleotide with phosphorothioate linkage
tcctcagataccctat

SEQ ID NO: 384 - DNA, 16 bp, synthetic construct
  source 1..16: mol_type = other DNA
  modified_base 1: mod_base = OTHER; note = 5-methyl beta-D-oxy locked nucleotide with phosphorothioate linkage
  modified_base 2: mod_base = OTHER; note = beta-D-oxy locked nucleotide with phosphorothioate linkage
  modified_base 3: mod_base = OTHER; note = Nucleotide with phosphorothioate linkage
  modified_base 4: mod_base = OTHER; note = Nucleotide with phosphorothioate linkage
  modified_base 5: mod_base = OTHER; note = Nucleotide with phosphorothioate linkage
  modified_base 6: mod_base = OTHER; note = Nucleotide with phosphorothioate linkage
  modified_base 7: mod_base = OTHER; note = Nucleotide with phosphorothioate linkage
  modified_base 8: mod_base = OTHER; note = Nucleotide with phosphorothioate linkage
  modified_base 9: mod_base = OTHER; note = Nucleotide with phosphorothioate linkage
  modified_base 10: mod_base = OTHER; note = Nucleotide with phosphorothioate linkage
  modified_base 11: mod_base = OTHER; note = Nucleotide with phosphorothioate linkage
  modified_base 12: mod_base = OTHER; note = Nucleotide with phosphorothioate linkage
  modified_base 13: mod_base = OTHER; note = beta-D-oxy locked nucleotide with phosphorothioate linkage
  modified_base 14: mod_base = OTHER; note = 5-methyl beta-D-oxy locked nucleotide with phosphorothioate linkage
  modified_base 15: mod_base = OTHER; note = 5-methyl beta-D-oxy locked nucleotide with phosphorothioate linkage
  modified_base 16: mod_base = OTHER; note = beta-D-oxy locked nucleotide with phosphorothioate linkage
caacgctataattcca

SEQ ID NO: 385 - DNA, 17 bp, synthetic construct
  source 1..17: mol_type = other DNA
  modified_base 1: mod_base = OTHER; note = 5-methyl beta-D-oxy locked nucleotide with phosphorothioate linkage
  modified_base 2: mod_base = OTHER; note = beta-D-oxy locked nucleotide with phosphorothioate linkage
  modified_base 3: mod_base = OTHER; note = 5-methyl beta-D-oxy locked nucleotide with phosphorothioate linkage
  modified_base 4: mod_base = OTHER; note = beta-D-oxy locked nucleotide with phosphorothioate linkage
  modified_base 5: mod_base = OTHER; note = Nucleotide with phosphorothioate linkage
  modified_base 6: mod_base = OTHER; note = Nucleotide with phosphorothioate linkage
  modified_base 7: mod_base = OTHER; note = Nucleotide with phosphorothioate linkage
  modified_base 8: mod_base = OTHER; note = Nucleotide with phosphorothioate linkage
  modified_base 9: mod_base = OTHER; note = Nucleotide with phosphorothioate linkage
  modified_base 10: mod_base = OTHER; note = Nucleotide with phosphorothioate linkage
  modified_base 11: mod_base = OTHER; note = Nucleotide with phosphorothioate linkage
  modified_base 12: mod_base = OTHER; note = Nucleotide with phosphorothioate linkage
  modified_base 13: mod_base = OTHER; note = Nucleotide with phosphorothioate linkage
  modified_base 14: mod_base = OTHER; note = Nucleotide with phosphorothioate linkage
  modified_base 15: mod_base = OTHER; note = beta-D-oxy locked nucleotide with phosphorothioate linkage
  modified_base 16: mod_base = OTHER; note = 5-methyl beta-D-oxy locked nucleotide with phosphorothioate linkage
  modified_base 17: mod_base = OTHER; note = 5-methyl beta-D-oxy locked nucleotide with phosphorothioate linkage
cacaacgctataattcc

SEQ ID NO: 386 - DNA, 16 bp, synthetic construct
  source 1..16: mol_type = other DNA
  modified_base 1: mod_base = OTHER; note = 5-methyl beta-D-oxy locked nucleotide with phosphorothioate linkage
  modified_base 2: mod_base = OTHER; note = beta-D-oxy locked nucleotide with phosphorothioate linkage
  modified_base 3: mod_base = OTHER; note = 5-methyl beta-D-oxy locked nucleotide with phosphorothioate linkage
  modified_base 4: mod_base = OTHER; note = beta-D-oxy locked nucleotide with phosphorothioate linkage
  modified_base 5: mod_base = OTHER; note = Nucleotide with phosphorothioate linkage
  modified_base 6: mod_base = OTHER; note = Nucleotide with phosphorothioate linkage
  modified_base 7: mod_base = OTHER; note = Nucleotide with phosphorothioate linkage
  modified_base 8: mod_base = OTHER; note = Nucleotide with phosphorothioate linkage
  modified_base 9: mod_base = OTHER; note = Nucleotide with phosphorothioate linkage
  modified_base 10: mod_base = OTHER; note = Nucleotide with phosphorothioate linkage
  modified_base 11: mod_base = OTHER; note = Nucleotide with phosphorothioate linkage
  modified_base 12: mod_base = OTHER; note = Nucleotide with phosphorothioate linkage
  modified_base 13: mod_base = OTHER; note = Nucleotide with phosphorothioate linkage
  modified_base 14: mod_base = OTHER; note = Nucleotide with phosphorothioate linkage
  modified_base 15: mod_base = OTHER; note = beta-D-oxy locked nucleotide with phosphorothioate linkage
  modified_base 16: mod_base = OTHER; note = beta-D-oxy locked nucleotide with phosphorothioate linkage
ctcacaacgctataat

SEQ ID NO: 387 - DNA, 17 bp, synthetic construct
  source 1..17: mol_type = other DNA
  modified_base 1: mod_base = OTHER; note = beta-D-oxy locked nucleotide with phosphorothioate linkage
  modified_base 2: mod_base = OTHER; note = beta-D-oxy locked nucleotide with phosphorothioate linkage
  modified_base 3: mod_base = OTHER; note = Nucleotide with phosphorothioate linkage
  modified_base 4: mod_base = OTHER; note = Nucleotide with phosphorothioate linkage
  modified_base 5: mod_base = OTHER; note = Nucleotide with phosphorothioate linkage
  modified_base 6: mod_base = OTHER; note = Nucleotide with phosphorothioate linkage
  modified_base 7: mod_base = OTHER; note = Nucleotide with phosphorothioate linkage
  modified_base 8: mod_base = OTHER; note = Nucleotide with phosphorothioate linkage
  modified_base 9: mod_base = OTHER; note = Nucleotide with phosphorothioate linkage
  modified_base 10: mod_base = OTHER; note = Nucleotide with phosphorothioate linkage
  modified_base 11: mod_base = OTHER; note = Nucleotide with phosphorothioate linkage
  modified_base 12: mod_base = OTHER; note = Nucleotide with phosphorothioate linkage
  modified_base 13: mod_base = OTHER; note = Nucleotide with phosphorothioate linkage
  modified_base 14: mod_base = OTHER; note = Nucleotide with phosphorothioate linkage
  modified_base 15: mod_base = OTHER; note = Nucleotide with phosphorothioate linkage
  modified_base 16: mod_base = OTHER; note = 5-methyl beta-D-oxy locked nucleotide with phosphorothioate linkage
  modified_base 17: mod_base = OTHER; note = beta-D-oxy locked nucleotide with phosphorothioate linkage
tatgtgctatcattcca

SEQ ID NO: 388 - DNA, 16 bp, synthetic construct
  source 1..16: mol_type = other DNA
  modified_base 1: mod_base = OTHER; note = beta-D-oxy locked nucleotide with phosphorothioate linkage
  modified_base 2: mod_base = OTHER; note = beta-D-oxy locked nucleotide with phosphorothioate linkage
  modified_base 3: mod_base = OTHER; note = 5-methyl beta-D-oxy locked nucleotide with phosphorothioate linkage
  modified_base 4: mod_base = OTHER; note = 5-methyl beta-D-oxy locked nucleotide with phosphorothioate linkage
  modified_base 5: mod_base = OTHER; note = Nucleotide with phosphorothioate linkage
  modified_base 6: mod_base = OTHER; note = Nucleotide with phosphorothioate linkage
  modified_base 7: mod_base = OTHER; note = Nucleotide with phosphorothioate linkage
  modified_base 8: mod_base = OTHER; note = Nucleotide with phosphorothioate linkage
  modified_base 9: mod_base = OTHER; note = Nucleotide with phosphorothioate linkage
  modified_base 10: mod_base = OTHER; note = Nucleotide with phosphorothioate linkage
  modified_base 11: mod_base = OTHER; note = Nucleotide with phosphorothioate linkage
  modified_base 12: mod_base = OTHER; note = Nucleotide with phosphorothioate linkage
  modified_base 13: mod_base = OTHER; note = beta-D-oxy locked nucleotide with phosphorothioate linkage
  modified_base 14: mod_base = OTHER; note = beta-D-oxy locked nucleotide with phosphorothioate linkage
  modified_base 15: mod_base = OTHER; note = beta-D-oxy locked nucleotide with phosphorothioate linkage
  modified_base 16: mod_base = OTHER; note = 5-methyl beta-D-oxy locked nucleotide with phosphorothioate linkage
aaccattattatgtac

SEQ ID NO: 389 - DNA, 16 bp, synthetic construct
  source 1..16: mol_type = other DNA
  modified_base 1: mod_base = OTHER; note = 5-methyl beta-D-oxy locked nucleotide with phosphorothioate linkage
  modified_base 2: mod_base = OTHER; note = 5-methyl beta-D-oxy locked nucleotide with phosphorothioate linkage
  modified_base 3: mod_base = OTHER; note = beta-D-oxy locked nucleotide with phosphorothioate linkage
  modified_base 4: mod_base = OTHER; note = 5-methyl beta-D-oxy locked nucleotide with phosphorothioate linkage
  modified_base 5: mod_base = OTHER; note = Nucleotide with phosphorothioate linkage
  modified_base 6: mod_base = OTHER; note = Nucleotide with phosphorothioate linkage
  modified_base 7: mod_base = OTHER; note = Nucleotide with phosphorothioate linkage
  modified_base 8: mod_base = OTHER; note = Nucleotide with phosphorothioate linkage
  modified_base 9: mod_base = OTHER; note = Nucleotide with phosphorothioate linkage
  modified_base 10: mod_base = OTHER; note = Nucleotide with phosphorothioate linkage
  modified_base 11: mod_base = OTHER; note = Nucleotide with phosphorothioate linkage
  modified_base 12: mod_base = OTHER; note = Nucleotide with phosphorothioate linkage
  modified_base 13: mod_base = OTHER; note = beta-D-oxy locked nucleotide with phosphorothioate linkage
  modified_base 14: mod_base = OTHER; note = beta-D-oxy locked nucleotide with phosphorothioate linkage
  modified_base 15: mod_base = OTHER; note = beta-D-oxy locked nucleotide with phosphorothioate linkage
  modified_base 16: mod_base = OTHER; note = 5-methyl beta-D-oxy locked nucleotide with phosphorothioate linkage
ccacttggacaaaaac

SEQ ID NO: 390 - DNA, 17 bp, synthetic construct
  source 1..17: mol_type = other DNA
  modified_base 1: mod_base = OTHER; note = beta-D-oxy locked nucleotide with phosphorothioate linkage
  modified_base 2: mod_base = OTHER; note = 5-methyl beta-D-oxy locked nucleotide with phosphorothioate linkage
  modified_base 3: mod_base = OTHER; note = beta-D-oxy locked nucleotide with phosphorothioate linkage
  modified_base 4: mod_base = OTHER; note = beta-D-oxy locked nucleotide with phosphorothioate linkage
  modified_base 5: mod_base = OTHER; note = Nucleotide with phosphorothioate linkage
  modified_base 6: mod_base = OTHER; note = Nucleotide with phosphorothioate linkage
  modified_base 7: mod_base = OTHER; note = Nucleotide with phosphorothioate linkage
  modified_base 8: mod_base = OTHER; note = Nucleotide with phosphorothioate linkage
  modified_base 9: mod_base = OTHER; note = Nucleotide with phosphorothioate linkage
  modified_base 10: mod_base = OTHER; note = Nucleotide with phosphorothioate linkage
  modified_base 11: mod_base = OTHER; note = Nucleotide with phosphorothioate linkage
  modified_base 12: mod_base = OTHER; note = Nucleotide with phosphorothioate linkage
  modified_base 13: mod_base = OTHER; note = Nucleotide with phosphorothioate linkage
  modified_base 14: mod_base = OTHER; note = beta-D-oxy locked nucleotide with phosphorothioate linkage
  modified_base 15: mod_base = OTHER; note = beta-D-oxy locked nucleotide with phosphorothioate linkage
  modified_base 16: mod_base = OTHER; note = beta-D-oxy locked nucleotide with phosphorothioate linkage
  modified_base 17: mod_base = OTHER; note = beta-D-oxy locked nucleotide with phosphorothioate linkage
tcttacacaatcctaat

SEQ ID NO: 391 - DNA, 18 bp, synthetic construct
  source 1..18: mol_type = other DNA
  modified_base 1: mod_base = OTHER; note = 5-methyl beta-D-oxy locked nucleotide with phosphorothioate linkage
  modified_base 2: mod_base = OTHER; note = beta-D-oxy locked nucleotide with phosphorothioate linkage
  modified_base 3: mod_base = OTHER; note = 5-methyl beta-D-oxy locked nucleotide with phosphorothioate linkage
  modified_base 4: mod_base = OTHER; note = Nucleotide with phosphorothioate linkage
  modified_base 5: mod_base = OTHER; note = Nucleotide with phosphorothioate linkage
  modified_base 6: mod_base = OTHER; note = Nucleotide with phosphorothioate linkage
  modified_base 7: mod_base = OTHER; note = Nucleotide with phosphorothioate linkage
  modified_base 8: mod_base = OTHER; note = Nucleotide with phosphorothioate linkage
  modified_base 9: mod_base = OTHER; note = Nucleotide with phosphorothioate linkage
  modified_base 10: mod_base = OTHER; note = Nucleotide with phosphorothioate linkage
  modified_base 11: mod_base = OTHER; note = Nucleotide with phosphorothioate linkage
  modified_base 12: mod_base = OTHER; note = Nucleotide with phosphorothioate linkage
  modified_base 13: mod_base = OTHER; note = Nucleotide with phosphorothioate linkage
  modified_base 14: mod_base = OTHER; note = Nucleotide with phosphorothioate linkage
  modified_base 15: mod_base = OTHER; note = Nucleotide with phosphorothioate linkage
  modified_base 16: mod_base = OTHER; note = Nucleotide with phosphorothioate linkage
  modified_base 17: mod_base = OTHER; note = beta-D-oxy locked nucleotide with phosphorothioate linkage
  modified_base 18: mod_base = OTHER; note = beta-D-oxy locked nucleotide with phosphorothioate linkage
ctcttacacaatcctaat

SEQ ID NO: 392 - DNA, 17 bp, synthetic construct
  source 1..17: mol_type = other DNA
  modified_base 1: mod_base = OTHER; note = beta-D-oxy locked nucleotide with phosphorothioate linkage
  modified_base 2: mod_base = OTHER; note = beta-D-oxy locked nucleotide with phosphorothioate linkage
  modified_base 3: mod_base = OTHER; note = beta-D-oxy locked nucleotide with phosphorothioate linkage
  modified_base 4: mod_base = OTHER; note = Nucleotide with phosphorothioate linkage
  modified_base 5: mod_base = OTHER; note = Nucleotide with phosphorothioate linkage
  modified_base 6: mod_base = OTHER; note = Nucleotide with phosphorothioate linkage
  modified_base 7: mod_base = OTHER; note = Nucleotide with phosphorothioate linkage
  modified_base 8: mod_base = OTHER; note = Nucleotide with phosphorothioate linkage
  modified_base 9: mod_base = OTHER; note = Nucleotide with phosphorothioate linkage
  modified_base 10: mod_base = OTHER; note = Nucleotide with phosphorothioate linkage
  modified_base 11: mod_base = OTHER; note = Nucleotide with phosphorothioate linkage
  modified_base 12: mod_base = OTHER; note = Nucleotide with phosphorothioate linkage
  modified_base 13: mod_base = OTHER; note = Nucleotide with phosphorothioate linkage
  modified_base 14: mod_base = OTHER; note = Nucleotide with phosphorothioate linkage
  modified_base 15: mod_base = OTHER; note = Nucleotide with phosphorothioate linkage
  modified_base 16: mod_base = OTHER; note = 5-methyl beta-D-oxy locked nucleotide with phosphorothioate linkage
  modified_base 17: mod_base = OTHER; note = 5-methyl beta-D-oxy locked nucleotide with phosphorothioate linkage
aagctcttacacaatcc

SEQ ID NO: 393 - DNA, 18 bp, synthetic construct
  source 1..18: mol_type = other DNA
  modified_base 1: mod_base = OTHER; note = beta-D-oxy locked nucleotide with phosphorothioate linkage
  modified_base 2: mod_base = OTHER; note = 5-methyl beta-D-oxy locked nucleotide with phosphorothioate linkage
  modified_base 3: mod_base = OTHER; note = beta-D-oxy locked nucleotide with phosphorothioate linkage
  modified_base 4: mod_base = OTHER; note = beta-D-oxy locked nucleotide with phosphorothioate linkage
  modified_base 5: mod_base = OTHER; note = Nucleotide with phosphorothioate linkage
  modified_base 6: mod_base = OTHER; note = Nucleotide with phosphorothioate linkage
  modified_base 7: mod_base = OTHER; note = Nucleotide with phosphorothioate linkage
  modified_base 8: mod_base = OTHER; note = Nucleotide with phosphorothioate linkage
  modified_base 9: mod_base = OTHER; note = Nucleotide with phosphorothioate linkage
  modified_base 10: mod_base = OTHER; note = Nucleotide with phosphorothioate linkage
  modified_base 11: mod_base = OTHER; note = Nucleotide with phosphorothioate linkage
  modified_base 12: mod_base = OTHER; note = Nucleotide with phosphorothioate linkage
  modified_base 13: mod_base = OTHER; note = Nucleotide with phosphorothioate linkage
  modified_base 14: mod_base = OTHER; note = Nucleotide with phosphorothioate linkage
  modified_base 15: mod_base = OTHER; note = beta-D-oxy locked nucleotide with phosphorothioate linkage
  modified_base 16: mod_base = OTHER; note = beta-D-oxy locked nucleotide with phosphorothioate linkage
  modified_base 17: mod_base = OTHER; note = beta-D-oxy locked nucleotide with phosphorothioate linkage
  modified_base 18: mod_base = OTHER; note = 5-methyl beta-D-oxy locked nucleotide with phosphorothioate linkage
acaagctcttacacaatc

SEQ ID NO: 394 - DNA, 17 bp, synthetic construct
  source 1..17: mol_type = other DNA
  modified_base 1: mod_base = OTHER; note = beta-D-oxy locked nucleotide with phosphorothioate linkage
  modified_base 2: mod_base = OTHER; note = 5-methyl beta-D-oxy locked nucleotide with phosphorothioate linkage
  modified_base 3: mod_base = OTHER; note = Nucleotide with phosphorothioate linkage
  modified_base 4: mod_base = OTHER; note = Nucleotide with phosphorothioate linkage
  modified_base 5: mod_base = OTHER; note = Nucleotide with phosphorothioate linkage
  modified_base 6: mod_base = OTHER; note = Nucleotide with phosphorothioate linkage
  modified_base 7: mod_base = OTHER; note = Nucleotide with phosphorothioate linkage
  modified_base 8: mod_base = OTHER; note = Nucleotide with phosphorothioate linkage
  modified_base 9: mod_base = OTHER; note = Nucleotide with phosphorothioate linkage
  modified_base 10: mod_base = OTHER; note = Nucleotide with phosphorothioate linkage
  modified_base 11: mod_base = OTHER; note = Nucleotide with phosphorothioate linkage
  modified_base 12: mod_base = OTHER; note = Nucleotide with phosphorothioate linkage
  modified_base 13: mod_base = OTHER; note = Nucleotide with phosphorothioate linkage
  modified_base 14: mod_base = OTHER; note = 5-methyl beta-D-oxy locked nucleotide with phosphorothioate linkage
  modified_base 15: mod_base = OTHER; note = beta-D-oxy locked nucleotide with phosphorothioate linkage
  modified_base 16: mod_base = OTHER; note = beta-D-oxy locked nucleotide with phosphorothioate linkage
  modified_base 17: mod_base = OTHER; note = beta-D-oxy locked nucleotide with phosphorothioate linkage
acaagctcttacacaat

SEQ ID NO: 395 - DNA, 17 bp, synthetic construct
  source 1..17: mol_type = other DNA
  modified_base 1: mod_base = OTHER; note = beta-D-oxy locked nucleotide with phosphorothioate linkage
  modified_base 2: mod_base = OTHER; note = beta-D-oxy locked nucleotide with phosphorothioate linkage
  modified_base 3: mod_base = OTHER; note = beta-D-oxy locked nucleotide with phosphorothioate linkage
  modified_base 4: mod_base = OTHER; note = Nucleotide with phosphorothioate linkage
  modified_base 5: mod_base = OTHER; note = Nucleotide with phosphorothioate linkage
  modified_base 6: mod_base = OTHER; note = Nucleotide with phosphorothioate linkage
  modified_base 7: mod_base = OTHER; note = Nucleotide with phosphorothioate linkage
  modified_base 8: mod_base = OTHER; note = Nucleotide with phosphorothioate linkage
  modified_base 9: mod_base = OTHER; note = Nucleotide with phosphorothioate linkage
  modified_base 10: mod_base = OTHER; note = Nucleotide with phosphorothioate linkage
  modified_base 11: mod_base = OTHER; note = Nucleotide with phosphorothioate linkage
  modified_base 12: mod_base = OTHER; note = Nucleotide with phosphorothioate linkage
  modified_base 13: mod_base = OTHER; note = Nucleotide with phosphorothioate linkage
  modified_base 14: mod_base = OTHER; note = Nucleotide with phosphorothioate linkage
  modified_base 15: mod_base = OTHER; note = 5-methyl beta-D-oxy locked nucleotide with phosphorothioate linkage
  modified_base 16: mod_base = OTHER; note = beta-D-oxy locked nucleotide with phosphorothioate linkage
  modified_base 17: mod_base = OTHER; note = 5-methyl beta-D-oxy locked nucleotide with phosphorothioate linkage
tagacaagctcttacac

SEQ ID NO: 396 - DNA, 17 bp, synthetic construct
  source 1..17: mol_type = other DNA
  modified_base 1: mod_base = OTHER; note = beta-D-oxy locked nucleotide with phosphorothioate linkage
  modified_base 2: mod_base = OTHER; note = beta-D-oxy locked nucleotide with phosphorothioate linkage
  modified_base 3: mod_base = OTHER; note = 5-methyl beta-D-oxy locked nucleotide with phosphorothioate linkage
  modified_base 4: mod_base = OTHER; note = beta-D-oxy locked nucleotide with phosphorothioate linkage
  modified_base 5: mod_base = OTHER; note = Nucleotide with phosphorothioate linkage
  modified_base 6: mod_base = OTHER; note = Nucleotide with phosphorothioate linkage
  modified_base 7: mod_base = OTHER; note = Nucleotide with phosphorothioate linkage
  modified_base 8: mod_base = OTHER; note = Nucleotide with phosphorothioate linkage
  modified_base 9: mod_base = OTHER; note = Nucleotide with phosphorothioate linkage
  modified_base 10: mod_base = OTHER; note = Nucleotide with phosphorothioate linkage
  modified_base 11: mod_base = OTHER; note = Nucleotide with phosphorothioate linkage
  modified_base 12: mod_base = OTHER; note = Nucleotide with phosphorothioate linkage
  modified_base 13: mod_base = OTHER; note = Nucleotide with phosphorothioate linkage
  modified_base 14: mod_base = OTHER; note = Nucleotide with phosphorothioate linkage
  modified_base 15: mod_base = OTHER; note = beta-D-oxy locked nucleotide with phosphorothioate linkage
  modified_base 16: mod_base = OTHER; note = beta-D-oxy locked nucleotide with phosphorothioate linkage
  modified_base 17: mod_base = OTHER; note = 5-methyl beta-D-oxy locked nucleotide with phosphorothioate linkage
ggcaactaatttattac

SEQ ID NO: 397 - DNA, 16 bp, synthetic construct
  source 1..16: mol_type = other DNA
  modified_base 1: mod_base = OTHER; note = beta-D-oxy locked nucleotide with phosphorothioate linkage
  modified_base 2: mod_base = OTHER; note = 5-methyl beta-D-oxy locked nucleotide with phosphorothioate linkage
  modified_base 3: mod_base = OTHER; note = Nucleotide with phosphorothioate linkage
  modified_base 4: mod_base = OTHER; note = Nucleotide with phosphorothioate linkage
  modified_base 5: mod_base = OTHER; note = Nucleotide with phosphorothioate linkage
  modified_base 6: mod_base = OTHER; note = Nucleotide with phosphorothioate linkage
  modified_base 7: mod_base = OTHER; note = Nucleotide with phosphorothioate linkage
  modified_base 8: mod_base = OTHER; note = Nucleotide with phosphorothioate linkage
  modified_base 9: mod_base = OTHER; note = Nucleotide with phosphorothioate linkage
  modified_base 10: mod_base = OTHER; note = Nucleotide with phosphorothioate linkage
  modified_base 11: mod_base = OTHER; note = Nucleotide with phosphorothioate linkage
  modified_base 12: mod_base = OTHER; note = Nucleotide with phosphorothioate linkage
  modified_base 13: mod_base = OTHER; note = Nucleotide with phosphorothioate linkage
  modified_base 14: mod_base = OTHER; note = 5-methyl beta-D-oxy locked nucleotide with phosphorothioate linkage
  modified_base 15: mod_base = OTHER; note = beta-D-oxy locked nucleotide with phosphorothioate linkage
  modified_base 16: mod_base = OTHER; note = 5-methyl beta-D-oxy locked nucleotide with phosphorothioate linkage
actcttaggtcaccac

SEQ ID NO: 398 - DNA, 16 bp, synthetic construct
  source 1..16: mol_type = other DNA
  modified_base 1: mod_base = OTHER; note = beta-D-oxy locked nucleotide with phosphorothioate linkage
  modified_base 2: mod_base = OTHER; note = 5-methyl beta-D-oxy locked nucleotide with phosphorothioate linkage
  modified_base 3: mod_base = OTHER; note = Nucleotide with phosphorothioate linkage
  modified_base 4: mod_base = OTHER; note = Nucleotide with phosphorothioate linkage
  modified_base 5: mod_base = OTHER; note = Nucleotide with phosphorothioate linkage
  modified_base 6: mod_base = OTHER; note = Nucleotide with phosphorothioate linkage
  modified_base 7: mod_base = OTHER; note = Nucleotide with phosphorothioate linkage
  modified_base 8: mod_base = OTHER; note = Nucleotide with phosphorothioate linkage
  modified_base 9: mod_base = OTHER; note = Nucleotide with phosphorothioate linkage
  modified_base 10: mod_base = OTHER; note = Nucleotide with phosphorothioate linkage
  modified_base 11: mod_base = OTHER; note = Nucleotide with phosphorothioate linkage
  modified_base 12: mod_base = OTHER; note = Nucleotide with phosphorothioate linkage
  modified_base 13: mod_base = OTHER; note = Nucleotide with phosphorothioate linkage
  modified_base 14: mod_base = OTHER; note = Nucleotide with phosphorothioate linkage
  modified_base 15: mod_base = OTHER; note = beta-D-oxy locked nucleotide with phosphorothioate linkage
  modified_base 16: mod_base = OTHER; note = beta-D-oxy locked nucleotide with phosphorothioate linkage
gccccaagaacatcat

SEQ ID NO: 399 - DNA, 16 bp, synthetic construct
  source 1..16: mol_type = other DNA
  modified_base 1: mod_base = OTHER; note = 5-methyl beta-D-oxy locked nucleotide with phosphorothioate linkage
  modified_base 2: mod_base = OTHER; note = beta-D-oxy locked nucleotide with phosphorothioate linkage
  modified_base 3: mod_base = OTHER; note = 5-methyl beta-D-oxy locked nucleotide with phosphorothioate linkage
  modified_base 4: mod_base = OTHER; note = beta-D-oxy locked nucleotide with phosphorothioate linkage
  modified_base 5: mod_base = OTHER; note = Nucleotide with phosphorothioate linkage
  modified_base 6: mod_base = OTHER; note = Nucleotide with phosphorothioate linkage
  modified_base 7: mod_base = OTHER; note = Nucleotide with phosphorothioate linkage
  modified_base 8: mod_base = OTHER; note = Nucleotide with phosphorothioate linkage
  modified_base 9: mod_base = OTHER; note = Nucleotide with phosphorothioate linkage
  modified_base 10: mod_base = OTHER; note = Nucleotide with phosphorothioate linkage
  modified_base 11: mod_base = OTHER; note = Nucleotide with phosphorothioate linkage
  modified_base 12: mod_base = OTHER; note = Nucleotide with phosphorothioate linkage
  modified_base 13: mod_base = OTHER; note = Nucleotide with phosphorothioate linkage
  modified_base 14: mod_base = OTHER; note = Nucleotide with phosphorothioate linkage
  modified_base 15: mod_base = OTHER; note = beta-D-oxy locked nucleotide with phosphorothioate linkage
  modified_base 16: mod_base = OTHER; note = 5-methyl beta-D-oxy locked nucleotide with phosphorothioate linkage
cgcaaaaccttttctc

SEQ ID NO: 400 - DNA, 16 bp, synthetic construct
  source 1..16: mol_type = other DNA
  modified_base 1: mod_base = OTHER; note = 5-methyl beta-D-oxy locked nucleotide with phosphorothioate linkage
  modified_base 2: mod_base = OTHER; note = beta-D-oxy locked nucleotide with phosphorothioate linkage
  modified_base 3: mod_base = OTHER; note = beta-D-oxy locked nucleotide with phosphorothioate linkage
  modified_base 4: mod_base = OTHER; note = beta-D-oxy locked nucleotide with phosphorothioate linkage
  modified_base 5: mod_base = OTHER; note = Nucleotide with phosphorothioate linkage
  modified_base 6: mod_base = OTHER; note = Nucleotide with phosphorothioate linkage
  modified_base 7: mod_base = OTHER; note = Nucleotide with phosphorothioate linkage
  modified_base 8: mod_base = OTHER; note = Nucleotide with phosphorothioate linkage
  modified_base 9: mod_base = OTHER; note = Nucleotide with phosphorothioate linkage
  modified_base 10: mod_base = OTHER; note = Nucleotide with phosphorothioate linkage
  modified_base 11: mod_base = OTHER; note = Nucleotide with phosphorothioate linkage
  modified_base 12: mod_base = OTHER; note = Nucleotide with phosphorothioate linkage
  modified_base 13: mod_base = OTHER; note = 5-methyl beta-D-oxy locked nucleotide with phosphorothioate linkage
  modified_base 14: mod_base = OTHER; note = 5-methyl beta-D-oxy locked nucleotide with phosphorothioate linkage
  modified_base 15: mod_base = OTHER; note = beta-D-oxy locked nucleotide with phosphorothioate linkage
  modified_base 16: mod_base = OTHER; note = beta-D-oxy locked nucleotide with phosphorothioate linkage
cttaaatactctccaa

SEQ ID NO: 401 - DNA, 17 bp, synthetic construct
  source 1..17: mol_type = other DNA
  modified_base 1: mod_base = OTHER; note = beta-D-oxy locked nucleotide with phosphorothioate linkage
  modified_base 2: mod_base = OTHER; note = beta-D-oxy locked nucleotide with phosphorothioate linkage
  modified_base 3: mod_base = OTHER; note = Nucleotide with phosphorothioate linkage
  modified_base 4: mod_base = OTHER; note = Nucleotide with phosphorothioate linkage
  modified_base 5: mod_base = OTHER; note = Nucleotide with phosphorothioate linkage
  modified_base 6: mod_base = OTHER; note = Nucleotide with phosphorothioate linkage
  modified_base 7: mod_base = OTHER; note = Nucleotide with phosphorothioate linkage
  modified_base 8: mod_base = OTHER; note = Nucleotide with phosphorothioate linkage
  modified_base 9: mod_base = OTHER; note = Nucleotide with phosphorothioate linkage
  modified_base 10: mod_base = OTHER; note = Nucleotide with phosphorothioate linkage
  modified_base 11: mod_base = OTHER; note = Nucleotide with phosphorothioate linkage
  modified_base 12: mod_base = OTHER; note = Nucleotide with phosphorothioate linkage
  modified_base 13: mod_base = OTHER; note = Nucleotide with phosphorothioate linkage
  modified_base 14: mod_base = OTHER; note = beta-D-oxy locked nucleotide with phosphorothioate linkage
  modified_base 15: mod_base = OTHER; note = 5-methyl beta-D-oxy locked nucleotide with phosphorothioate linkage
  modified_base 16: mod_base = OTHER; note = 5-methyl beta-D-oxy locked nucleotide with phosphorothioate linkage
  modified_base 17: mod_base = OTHER; note = beta-D-oxy locked nucleotide with phosphorothioate linkage
tgcttaaatactctcca

SEQ ID NO: 402 - DNA, 17 bp, synthetic construct
  source 1..17: mol_type = other DNA
  modified_base 1: mod_base = OTHER; note = beta-D-oxy locked nucleotide with phosphorothioate linkage
  modified_base 2: mod_base = OTHER; note = beta-D-oxy locked nucleotide with phosphorothioate linkage
  modified_base 3: mod_base = OTHER; note = Nucleotide with phosphorothioate linkage
  modified_base 4: mod_base = OTHER; note = Nucleotide with phosphorothioate linkage
  modified_base 5: mod_base = OTHER; note = Nucleotide with phosphorothioate linkage
  modified_base 6: mod_base = OTHER; note = Nucleotide with phosphorothioate linkage
  modified_base 7: mod_base = OTHER; note = Nucleotide with phosphorothioate linkage
  modified_base 8: mod_base = OTHER; note = Nucleotide with phosphorothioate linkage
  modified_base 9: mod_base = OTHER; note = Nucleotide with phosphorothioate linkage
  modified_base 10: mod_base = OTHER; note = Nucleotide with phosphorothioate linkage
  modified_base 11: mod_base = OTHER; note = Nucleotide with phosphorothioate linkage
  modified_base 12: mod_base = OTHER; note = Nucleotide with phosphorothioate linkage
  modified_base 13: mod_base = OTHER; note = Nucleotide with phosphorothioate linkage
  modified_base 14: mod_base = OTHER; note = Nucleotide with phosphorothioate linkage
  modified_base 15: mod_base = OTHER; note = Nucleotide with phosphorothioate linkage
  modified_base 16: mod_base = OTHER; note = 5-methyl beta-D-oxy locked nucleotide with phosphorothioate linkage
  modified_base 17: mod_base = OTHER; note = 5-methyl beta-D-oxy locked nucleotide with phosphorothioate linkage
ttgcttaaatactctcc

SEQ ID NO: 403 - DNA, 21 bp, synthetic construct
  source 1..21: mol_type = other DNA
  modified_base 1: mod_base = OTHER; note = 5-methyl beta-D-oxy locked nucleotide with phosphorothioate linkage
  modified_base 2: mod_base = OTHER; note = beta-D-oxy locked nucleotide with phosphorothioate linkage
  modified_base 3: mod_base = OTHER; note = 5-methyl beta-D-oxy locked nucleotide with phosphorothioate linkage
  modified_base 4: mod_base = OTHER; note = beta-D-oxy locked nucleotide with phosphorothioate linkage
  modified_base 5: mod_base = OTHER; note = Nucleotide with phosphorothioate linkage
  modified_base 6: mod_base = OTHER; note = Nucleotide with phosphorothioate linkage
  modified_base 7: mod_base = OTHER; note = Nucleotide with phosphorothioate linkage
  modified_base 8: mod_base = OTHER; note = Nucleotide with phosphorothioate linkage
  modified_base 9: mod_base = OTHER; note = Nucleotide with phosphorothioate linkage
  modified_base 10: mod_base = OTHER; note = Nucleotide with phosphorothioate linkage
  modified_base 11: mod_base = OTHER; note = Nucleotide with phosphorothioate linkage
  modified_base 12: mod_base = OTHER; note = Nucleotide with phosphorothioate linkage
  modified_base 13: mod_base = OTHER; note = Nucleotide with phosphorothioate linkage
  modified_base 14: mod_base = OTHER; note = Nucleotide with phosphorothioate linkage
  modified_base 15: mod_base = OTHER; note = Nucleotide with phosphorothioate linkage
  modified_base 16: mod_base = OTHER; note = Nucleotide with phosphorothioate linkage
  modified_base 17: mod_base = OTHER; note = Nucleotide with phosphorothioate linkage
  modified_base 18: mod_base = OTHER; note = Nucleotide with phosphorothioate linkage
  modified_base 19: mod_base = OTHER; note = Nucleotide with phosphorothioate linkage
  modified_base 20: mod_base = OTHER; note = 5-methyl beta-D-oxy locked nucleotide with phosphorothioate linkage
  modified_base 21: mod_base = OTHER; note = 5-methyl beta-D-oxy locked nucleotide with phosphorothioate linkage
cacaaacaaacaaactaaacc

SEQ ID NO: 404 - DNA, 20 bp, synthetic construct
  source 1..20: mol_type = other DNA
  modified_base 1: mod_base = OTHER; note = beta-D-oxy locked nucleotide with phosphorothioate linkage
  modified_base 2: mod_base = OTHER; note = 5-methyl beta-D-oxy locked nucleotide with phosphorothioate linkage
  modified_base 3: mod_base = OTHER; note = beta-D-oxy locked nucleotide with phosphorothioate linkage
  modified_base 4: mod_base = OTHER; note = 5-methyl beta-D-oxy locked nucleotide with phosphorothioate linkage
  modified_base 5: mod_base = OTHER; note = Nucleotide with phosphorothioate linkage
  modified_base 6: mod_base = OTHER; note = Nucleotide with phosphorothioate linkage
  modified_base 7: mod_base = OTHER; note = Nucleotide with phosphorothioate linkage
  modified_base 8: mod_base = OTHER; note = Nucleotide with phosphorothioate linkage
  modified_base 9: mod_base = OTHER; note = Nucleotide with phosphorothioate linkage
  modified_base 10: mod_base = OTHER; note = Nucleotide with phosphorothioate linkage
  modified_base 11: mod_base = OTHER; note = Nucleotide with phosphorothioate linkage
  modified_base 12: mod_base = OTHER; note = Nucleotide with phosphorothioate linkage
  modified_base 13: mod_base = OTHER; note = Nucleotide with phosphorothioate linkage
  modified_base 14: mod_base = OTHER; note = Nucleotide with phosphorothioate linkage
  modified_base 15: mod_base = OTHER; note = Nucleotide with phosphorothioate linkage
  modified_base 16: mod_base = OTHER; note = Nucleotide with phosphorothioate linkage
  modified_base 17: mod_base = OTHER; note = beta-D-oxy locked nucleotide with phosphorothioate linkage
  modified_base 18: mod_base = OTHER; note = beta-D-oxy locked nucleotide with phosphorothioate linkage
  modified_base 19: mod_base = OTHER; note = beta-D-oxy locked nucleotide with phosphorothioate linkage
  modified_base 20: mod_base = OTHER; note = beta-D-oxy locked nucleotide with phosphorothioate linkage
gcacaaacaaacaaactaaa

SEQ ID NO: 405 - DNA, 17 bp, synthetic construct
  source 1..17: mol_type = other DNA
  modified_base 1: mod_base = OTHER; note = 5-methyl beta-D-oxy locked nucleotide with phosphorothioate linkage
  modified_base 2: mod_base = OTHER; note = beta-D-oxy locked nucleotide with phosphorothioate linkage
  modified_base 3: mod_base = OTHER; note = beta-D-oxy locked nucleotide with phosphorothioate linkage
  modified_base 4: mod_base = OTHER; note = Nucleotide with phosphorothioate linkage
  modified_base 5: mod_base = OTHER; note = Nucleotide with phosphorothioate linkage
  modified_base 6: mod_base = OTHER; note = Nucleotide with phosphorothioate linkage
  modified_base 7: mod_base = OTHER; note = Nucleotide with phosphorothioate linkage
  modified_base 8: mod_base = OTHER; note = Nucleotide with phosphorothioate linkage
  modified_base 9: mod_base = OTHER; note = Nucleotide with phosphorothioate linkage
  modified_base 10: mod_base = OTHER; note = Nucleotide with phosphorothioate linkage
  modified_base 11: mod_base = OTHER; note = Nucleotide with phosphorothioate linkage
  modified_base 12: mod_base = OTHER; note = Nucleotide with phosphorothioate linkage
  modified_base 13: mod_base = OTHER; note = Nucleotide with phosphorothioate linkage
  modified_base 14: mod_base = OTHER; note = Nucleotide with phosphorothioate linkage
  modified_base 15: mod_base = OTHER; note = Nucleotide with phosphorothioate linkage
  modified_base 16: mod_base = OTHER; note = beta-D-oxy locked nucleotide with phosphorothioate linkage
  modified_base 17: mod_base = OTHER; note = beta-D-oxy locked nucleotide with phosphorothioate linkage
cagaagtatccaccaat

SEQ ID NO: 406 - DNA, 16 bp, synthetic construct
  source 1..16: mol_type = other DNA
  modified_base 1: mod_base = OTHER; note = beta-D-oxy locked nucleotide with phosphorothioate linkage
  modified_base 2: mod_base = OTHER; note = beta-D-oxy locked nucleotide with phosphorothioate linkage
  modified_base 3: mod_base = OTHER; note = Nucleotide with phosphorothioate linkage
  modified_base 4: mod_base = OTHER; note = Nucleotide with phosphorothioate linkage
  modified_base 5: mod_base = OTHER; note = Nucleotide with phosphorothioate linkage
  modified_base 6: mod_base = OTHER; note = Nucleotide with phosphorothioate linkage
  modified_base 7: mod_base = OTHER; note = Nucleotide with phosphorothioate linkage
  modified_base 8: mod_base = OTHER; note = Nucleotide with phosphorothioate linkage
  modified_base 9: mod_base = OTHER; note = Nucleotide with phosphorothioate linkage
  modified_base 10: mod_base = OTHER; note = Nucleotide with phosphorothioate linkage
  modified_base 11: mod_base = OTHER; note = Nucleotide with phosphorothioate linkage
  modified_base 12: mod_base = OTHER; note = Nucleotide with phosphorothioate linkage
  modified_base 13: mod_base = OTHER; note = Nucleotide with phosphorothioate linkage
  modified_base 14: mod_base = OTHER; note = Nucleotide with phosphorothioate linkage
  modified_base 15: mod_base = OTHER; note = 5-methyl beta-D-oxy locked nucleotide with phosphorothioate linkage
  modified_base 16: mod_base = OTHER; note = 5-methyl beta-D-oxy locked nucleotide with phosphorothioate linkage
ggctaaactcacctcc

SEQ ID NO: 407 - DNA, 16 bp, synthetic construct
  source 1..16: mol_type = other DNA
  modified_base 1: mod_base = OTHER; note = beta-D-oxy locked nucleotide with phosphorothioate linkage
  modified_base 2: mod_base = OTHER; note = beta-D-oxy locked nucleotide with phosphorothioate linkage
  modified_base 3: mod_base = OTHER; note = Nucleotide with phosphorothioate linkage
  modified_base 4: mod_base = OTHER; note = Nucleotide with phosphorothioate linkage
  modified_base 5: mod_base = OTHER; note = Nucleotide with phosphorothioate linkage
  modified_base 6: mod_base = OTHER; note = Nucleotide with phosphorothioate linkage
  modified_base 7: mod_base = OTHER; note = Nucleotide with phosphorothioate linkage
  modified_base 8: mod_base = OTHER; note = Nucleotide with phosphorothioate linkage
  modified_base 9: mod_base = OTHER; note = Nucleotide with phosphorothioate linkage
  modified_base 10: mod_base = OTHER; note = Nucleotide with phosphorothioate linkage
  modified_base 11: mod_base = OTHER; note = Nucleotide with phosphorothioate linkage
  modified_base 12: mod_base = OTHER; note = Nucleotide with phosphorothioate linkage
  modified_base 13: mod_base = OTHER; note = Nucleotide with phosphorothioate linkage
  modified_base 14: mod_base = OTHER; note = 5-methyl beta-D-oxy locked nucleotide with phosphorothioate linkage
  modified_base 15: mod_base = OTHER; note = beta-D-oxy locked nucleotide with phosphorothioate linkage
  modified_base 16: mod_base = OTHER; note = 5-methyl beta-D-oxy locked nucleotide with phosphorothioate linkage
aggctaaactcacctc

SEQ ID NO: 408 - DNA, 17 bp, synthetic construct
  source 1..17: mol_type = other DNA
  modified_base 1: mod_base = OTHER; note = beta-D-oxy locked nucleotide with phosphorothioate linkage
  modified_base 2: mod_base = OTHER; note = beta-D-oxy locked nucleotide with phosphorothioate linkage
  modified_base 3: mod_base = OTHER; note = Nucleotide with phosphorothioate linkage
  modified_base 4: mod_base = OTHER; note = Nucleotide with phosphorothioate linkage
  modified_base 5: mod_base = OTHER; note = Nucleotide with phosphorothioate linkage
  modified_base 6: mod_base = OTHER; note = Nucleotide with phosphorothioate linkage
  modified_base 7: mod_base = OTHER; note = Nucleotide with phosphorothioate linkage
  modified_base 8: mod_base = OTHER; note = Nucleotide with phosphorothioate linkage
  modified_base 9: mod_base = OTHER; note = Nucleotide with phosphorothioate linkage
  modified_base 10: mod_base = OTHER; note = Nucleotide with phosphorothioate linkage
  modified_base 11: mod_base = OTHER; note = Nucleotide with phosphorothioate linkage
  modified_base 12: mod_base = OTHER; note = Nucleotide with phosphorothioate linkage
  modified_base 13: mod_base = OTHER; note = Nucleotide with phosphorothioate linkage
  modified_base 14: mod_base = OTHER; note = Nucleotide with phosphorothioate linkage
  modified_base 15: mod_base = OTHER; note = Nucleotide with phosphorothioate linkage
  modified_base 16: mod_base = OTHER; note = 5-methyl beta-D-oxy locked nucleotide with phosphorothioate linkage
  modified_base 17: mod_base = OTHER; note = 5-methyl beta-D-oxy locked nucleotide with phosphorothioate linkage
aatccatcccaaatccc

SEQ ID NO: 409 - DNA, 16 bp, synthetic construct
  source 1..16: mol_type = other DNA
  modified_base 1: mod_base = OTHER; note = beta-D-oxy locked nucleotide with phosphorothioate linkage
  modified_base 2: mod_base = OTHER; note = 5-methyl beta-D-oxy locked nucleotide with phosphorothioate linkage
  modified_base 3: mod_base = OTHER; note = Nucleotide with phosphorothioate linkage
  modified_base 4: mod_base = OTHER; note = Nucleotide with phosphorothioate linkage
  modified_base 5: mod_base = OTHER; note = Nucleotide with phosphorothioate linkage
  modified_base 6: mod_base = OTHER; note = Nucleotide with phosphorothioate linkage
  modified_base 7: mod_base = OTHER; note = Nucleotide with phosphorothioate linkage
  modified_base 8: mod_base = OTHER; note = Nucleotide with phosphorothioate linkage
  modified_base 9: mod_base = OTHER; note = Nucleotide with phosphorothioate linkage
  modified_base 10: mod_base = OTHER; note = Nucleotide with phosphorothioate linkage
  modified_base 11: mod_base = OTHER; note = Nucleotide with phosphorothioate linkage
  modified_base 12: mod_base = OTHER; note = Nucleotide with phosphorothioate linkage
  modified_base 13: mod_base = OTHER; note = Nucleotide with phosphorothioate linkage
  modified_base 14: mod_base = OTHER; note = Nucleotide with phosphorothioate linkage
  modified_base 15: mod_base = OTHER; note = 5-methyl beta-D-oxy locked nucleotide with phosphorothioate linkage
  modified_base 16: mod_base = OTHER; note = 5-methyl beta-D-oxy locked nucleotide with phosphorothioate linkage
actaagccctcaatcc

SEQ ID NO: 410 - DNA, 17 bp, synthetic construct
  source 1..17: mol_type = other DNA
  modified_base 1: mod_base = OTHER; note = beta-D-oxy locked nucleotide with phosphorothioate linkage
  modified_base 2: mod_base = OTHER; note = beta-D-oxy locked nucleotide with phosphorothioate linkage
  modified_base 3: mod_base = OTHER; note = beta-D-oxy locked nucleotide with phosphorothioate linkage
  modified_base 4: mod_base = OTHER; note = beta-D-oxy locked nucleotide with phosphorothioate linkage
  modified_base 5: mod_base = OTHER; note = Nucleotide with phosphorothioate linkage
  modified_base 6: mod_base = OTHER; note = Nucleotide with phosphorothioate linkage
  modified_base 7: mod_base = OTHER; note = Nucleotide with phosphorothioate linkage
  modified_base 8: mod_base = OTHER; note = Nucleotide with phosphorothioate linkage
  modified_base 9: mod_base = OTHER; note = Nucleotide with phosphorothioate linkage
  modified_base 10: mod_base = OTHER; note = Nucleotide with phosphorothioate linkage
  modified_base 11: mod_base = OTHER; note = Nucleotide with phosphorothioate linkage
  modified_base 12: mod_base = OTHER; note = Nucleotide with phosphorothioate linkage
  modified_base 13: mod_base = OTHER; note = Nucleotide with phosphorothioate linkage
  modified_base 14: mod_base = OTHER; note = beta-D-oxy locked nucleotide with phosphorothioate linkage
  modified_base 15: mod_base = OTHER; note = 5-methyl beta-D-oxy locked nucleotide with phosphorothioate linkage
  modified_base 16: mod_base = OTHER; note = beta-D-oxy locked nucleotide with phosphorothioate linkage
  modified_base 17: mod_base = OTHER; note = beta-D-oxy locked nucleotide with phosphorothioate linkage
aaagcctaatcaaactt

SEQ ID NO: 411 - DNA, 16 bp, synthetic construct
  source 1..16: mol_type = other DNA
  modified_base 1: mod_base = OTHER; note = beta-D-oxy locked nucleotide with phosphorothioate linkage
  modified_base 2: mod_base = OTHER; note = beta-D-oxy locked nucleotide with phosphorothioate linkage
  modified_base 3: mod_base = OTHER; note = Nucleotide with phosphorothioate linkage
  modified_base 4: mod_base = OTHER; note = Nucleotide with phosphorothioate linkage
  modified_base 5: mod_base = OTHER; note = Nucleotide with phosphorothioate linkage
  modified_base 6: mod_base = OTHER; note = Nucleotide with phosphorothioate linkage
  modified_base 7: mod_base = OTHER; note = Nucleotide with phosphorothioate linkage
  modified_base 8: mod_base = OTHER; note = Nucleotide with phosphorothioate linkage
  modified_base 9: mod_base = OTHER; note = Nucleotide with phosphorothioate linkage
  modified_base 10: mod_base = OTHER; note = Nucleotide with phosphorothioate linkage
  modified_base 11: mod_base = OTHER; note = Nucleotide with phosphorothioate linkage
  modified_base 12: mod_base = OTHER; note = Nucleotide with phosphorothioate linkage
  modified_base 13: mod_base = OTHER; note = Nucleotide with phosphorothioate linkage
  modified_base 14: mod_base = OTHER; note = Nucleotide with phosphorothioate linkage
  modified_base 15: mod_base = OTHER; note = 5-methyl beta-D-oxy locked nucleotide with phosphorothioate linkage
  modified_base 16: mod_base = OTHER; note = 5-methyl beta-D-oxy locked nucleotide with phosphorothioate linkage
atggaccttatcttcc

SEQ ID NO: 412 - DNA, 17 bp, synthetic construct
  source 1..17: mol_type = other DNA
  modified_base 1: mod_base = OTHER; note = beta-D-oxy locked nucleotide with phosphorothioate linkage
  modified_base 2: mod_base = OTHER; note = beta-D-oxy locked nucleotide with phosphorothioate linkage
  modified_base 3: mod_base = OTHER; note = beta-D-oxy locked nucleotide with phosphorothioate linkage
  modified_base 4: mod_base = OTHER; note = beta-D-oxy locked nucleotide with phosphorothioate linkage
  modified_base 5: mod_base = OTHER; note = Nucleotide with phosphorothioate linkage
  modified_base 6: mod_base = OTHER; note = Nucleotide with phosphorothioate linkage
  modified_base 7: mod_base = OTHER; note = Nucleotide with phosphorothioate linkage
  modified_base 8: mod_base = OTHER; note = Nucleotide with phosphorothioate linkage
  modified_base 9: mod_base = OTHER; note = Nucleotide with phosphorothioate linkage
  modified_base 10: mod_base = OTHER; note = Nucleotide with phosphorothioate linkage
  modified_base 11: mod_base = OTHER; note = Nucleotide with phosphorothioate linkage
  modified_base 12: mod_base = OTHER; note = Nucleotide with phosphorothioate linkage
  modified_base 13: mod_base = OTHER; note = Nucleotide with phosphorothioate linkage
  modified_base 14: mod_base = OTHER; note = beta-D-oxy locked nucleotide with phosphorothioate linkage
  modified_base 15: mod_base = OTHER; note = beta-D-oxy locked nucleotide with phosphorothioate linkage
  modified_base 16: mod_base = OTHER; note = 5-methyl beta-D-oxy locked nucleotide with phosphorothioate linkage
  modified_base 17: mod_base = OTHER; note = beta-D-oxy locked nucleotide with phosphorothioate linkage
attgtatccttataact

SEQ ID NO: 413 - DNA, 17 bp, synthetic construct
  source 1..17: mol_type = other DNA
  modified_base 1: mod_base = OTHER; note = beta-D-oxy locked nucleotide with phosphorothioate linkage
  modified_base 2: mod_base = OTHER; note = 5-methyl beta-D-oxy locked nucleotide with phosphorothioate linkage
  modified_base 3: mod_base = OTHER; note = beta-D-oxy locked nucleotide with phosphorothioate linkage
  modified_base 4: mod_base = OTHER; note = Nucleotide with phosphorothioate linkage
  modified_base 5: mod_base = OTHER; note = Nucleotide with phosphorothioate linkage
  modified_base 6: mod_base = OTHER; note = Nucleotide with phosphorothioate linkage
  modified_base 7: mod_base = OTHER; note = Nucleotide with phosphorothioate linkage
  modified_base 8: mod_base = OTHER; note = Nucleotide with phosphorothioate linkage
  modified_base 9: mod_base = OTHER; note = Nucleotide with phosphorothioate linkage
  modified_base 10: mod_base = OTHER; note = Nucleotide with phosphorothioate linkage
  modified_base 11: mod_base = OTHER; note = Nucleotide with phosphorothioate linkage
  modified_base 12: mod_base = OTHER; note = Nucleotide with phosphorothioate linkage
  modified_base 13: mod_base = OTHER; note = Nucleotide with phosphorothioate linkage
  modified_base 14: mod_base = OTHER; note = beta-D-oxy locked nucleotide with phosphorothioate linkage
  modified_base 15: mod_base = OTHER; note = beta-D-oxy locked nucleotide with phosphorothioate linkage
  modified_base 16: mod_base = OTHER; note = beta-D-oxy locked nucleotide with phosphorothioate linkage
  modified_base 17: mod_base = OTHER; note = beta-D-oxy locked nucleotide with phosphorothioate linkage
acattgtatccttataa

SEQ ID NO: 414 - DNA, 16 bp, synthetic construct
  source 1..16: mol_type = other DNA
  modified_base 1: mod_base = OTHER; note = beta-D-oxy locked nucleotide with phosphorothioate linkage
  modified_base 2: mod_base = OTHER; note = beta-D-oxy locked nucleotide with phosphorothioate linkage
  modified_base 3: mod_base = OTHER; note = 5-methyl beta-D-oxy locked nucleotide with phosphorothioate linkage
  modified_base 4: mod_base = OTHER; note = beta-D-oxy locked nucleotide with phosphorothioate linkage
  modified_base 5: mod_base = OTHER; note = Nucleotide with phosphorothioate linkage
  modified_base 6: mod_base = OTHER; note = Nucleotide with phosphorothioate linkage
  modified_base 7: mod_base = OTHER; note = Nucleotide with phosphorothioate linkage
  modified_base 8: mod_base = OTHER; note = Nucleotide with phosphorothioate linkage
  modified_base 9: mod_base = OTHER; note = Nucleotide with phosphorothioate linkage
  modified_base 10: mod_base = OTHER; note = Nucleotide with phosphorothioate linkage
  modified_base 11: mod_base = OTHER; note = Nucleotide with phosphorothioate linkage
  modified_base 12: mod_base = OTHER; note = Nucleotide with phosphorothioate linkage
  modified_base 13: mod_base = OTHER; note = beta-D-oxy locked nucleotide with phosphorothioate linkage
  modified_base 14: mod_base = OTHER; note = beta-D-oxy locked nucleotide with phosphorothioate linkage
  modified_base 15: mod_base = OTHER; note = beta-D-oxy locked nucleotide with phosphorothioate linkage
  modified_base 16: mod_base = OTHER; note = beta-D-oxy locked nucleotide with phosphorothioate linkage
aacattgtatccttat

SEQ ID NO: 415 - DNA, 20 bp, synthetic construct
  source 1..20: mol_type = other DNA
  modified_base 1: mod_base = OTHER; note = 5-methyl beta-D-oxy locked nucleotide with phosphorothioate linkage
  modified_base 2: mod_base = OTHER; note = beta-D-oxy locked nucleotide with phosphorothioate linkage
  modified_base 3: mod_base = OTHER; note = 5-methyl beta-D-oxy locked nucleotide with phosphorothioate linkage
  modified_base 4: mod_base = OTHER; note = 5-methyl beta-D-oxy locked nucleotide with phosphorothioate linkage
  modified_base 5: mod_base = OTHER; note = Nucleotide with phosphorothioate linkage
  modified_base 6: mod_base = OTHER; note = Nucleotide with phosphorothioate linkage
  modified_base 7: mod_base = OTHER; note = Nucleotide with phosphorothioate linkage
  modified_base 8: mod_base = OTHER; note = Nucleotide with phosphorothioate linkage
  modified_base 9: mod_base = OTHER; note = Nucleotide with phosphorothioate linkage
  modified_base 10: mod_base = OTHER; note = Nucleotide with phosphorothioate linkage
  modified_base 11: mod_base = OTHER; note = Nucleotide with phosphorothioate linkage
  modified_base 12: mod_base = OTHER; note = Nucleotide with phosphorothioate linkage
  modified_base 13: mod_base = OTHER; note = Nucleotide with phosphorothioate linkage
  modified_base 14: mod_base = OTHER; note = Nucleotide with phosphorothioate linkage
  modified_base 15: mod_base = OTHER; note = Nucleotide with phosphorothioate linkage
  modified_base 16: mod_base = OTHER; note = Nucleotide with phosphorothioate linkage
  modified_base 17: mod_base = OTHER; note = Nucleotide with phosphorothioate linkage
  modified_base 18: mod_base = OTHER; note = Nucleotide with phosphorothioate linkage
  modified_base 19: mod_base = OTHER; note = beta-D-oxy locked nucleotide with phosphorothioate linkage
  modified_base 20: mod_base = OTHER; note = 5-methyl beta-D-oxy locked nucleotide with phosphorothioate linkage
caccatgaaccaaaataaac

SEQ ID NO: 416 - DNA, 17 bp, synthetic construct
  source 1..17: mol_type = other DNA
  modified_base 1: mod_base = OTHER; note = beta-D-oxy locked nucleotide with phosphorothioate linkage
  modified_base 2: mod_base = OTHER; note = beta-D-oxy locked nucleotide with phosphorothioate linkage
  modified_base 3: mod_base = OTHER; note = Nucleotide with phosphorothioate linkage
  modified_base 4: mod_base = OTHER; note = Nucleotide with phosphorothioate linkage
  modified_base 5: mod_base = OTHER; note = Nucleotide with phosphorothioate linkage
  modified_base 6: mod_base = OTHER; note = Nucleotide with phosphorothioate linkage
  modified_base 7: mod_base = OTHER; note = Nucleotide with phosphorothioate linkage
  modified_base 8: mod_base = OTHER; note = Nucleotide with phosphorothioate linkage
  modified_base 9: mod_base = OTHER; note = Nucleotide with phosphorothioate linkage
  modified_base 10: mod_base = OTHER; note = Nucleotide with phosphorothioate linkage
  modified_base 11: mod_base = OTHER; note = Nucleotide with phosphorothioate linkage
  modified_base 12: mod_base = OTHER; note = Nucleotide with phosphorothioate linkage
  modified_base 13: mod_base = OTHER; note = Nucleotide with phosphorothioate linkage
  modified_base 14: mod_base = OTHER; note = 5-methyl beta-D-oxy locked nucleotide with phosphorothioate linkage
  modified_base 15: mod_base = OTHER; note = beta-D-oxy locked nucleotide with phosphorothioate linkage
  modified_base 16: mod_base = OTHER; note = beta-D-oxy locked nucleotide with phosphorothioate linkage
  modified_base 17: mod_base = OTHER; note = 5-methyl beta-D-oxy locked nucleotide with phosphorothioate linkage
aactttgctctaccatc

SEQ ID NO: 417 - DNA, 18 bp, synthetic construct
  source 1..18: mol_type = other DNA
  modified_base 1: mod_base = OTHER; note = beta-D-oxy locked nucleotide with phosphorothioate linkage
  modified_base 2: mod_base = OTHER; note = 5-methyl beta-D-oxy locked nucleotide with phosphorothioate linkage
  modified_base 3: mod_base = OTHER; note = beta-D-oxy locked nucleotide with phosphorothioate linkage
  modified_base 4: mod_base = OTHER; note = beta-D-oxy locked nucleotide with phosphorothioate linkage
  modified_base 5: mod_base = OTHER; note = Nucleotide with phosphorothioate linkage
  modified_base 6: mod_base = OTHER; note = Nucleotide with phosphorothioate linkage
  modified_base 7: mod_base = OTHER; note = Nucleotide with phosphorothioate linkage
  modified_base 8: mod_base = OTHER; note = Nucleotide with phosphorothioate linkage
  modified_base 9: mod_base = OTHER; note = Nucleotide with phosphorothioate linkage
  modified_base 10: mod_base = OTHER; note = Nucleotide with phosphorothioate linkage
  modified_base 11: mod_base = OTHER; note = Nucleotide with phosphorothioate linkage
  modified_base 12: mod_base = OTHER; note = Nucleotide with phosphorothioate linkage
  modified_base 13: mod_base = OTHER; note = Nucleotide with phosphorothioate linkage
  modified_base 14: mod_base = OTHER; note = Nucleotide with phosphorothioate linkage
  modified_base 15: mod_base = OTHER; note = Nucleotide with phosphorothioate linkage
  modified_base 16: mod_base = OTHER; note = beta-D-oxy locked nucleotide with phosphorothioate linkage
  modified_base 17: mod_base = OTHER; note = beta-D-oxy locked nucleotide with phosphorothioate linkage
  modified_base 18: mod_base = OTHER; note = beta-D-oxy locked nucleotide with phosphorothioate linkage
tcttaatcatctccaaaa

SEQ ID NO: 418 - DNA, 17 bp, synthetic construct
  source 1..17: mol_type = other DNA
  modified_base 1: mod_base = OTHER; note = beta-D-oxy locked nucleotide with phosphorothioate linkage
  modified_base 2: mod_base = OTHER; note = 5-methyl beta-D-oxy locked nucleotide with phosphorothioate linkage
  modified_base 3: mod_base = OTHER; note = beta-D-oxy locked nucleotide with phosphorothioate linkage
  modified_base 4: mod_base = OTHER; note = beta-D-oxy locked nucleotide with phosphorothioate linkage
  modified_base 5: mod_base = OTHER; note = Nucleotide with phosphorothioate linkage
  modified_base 6: mod_base = OTHER; note = Nucleotide with phosphorothioate linkage
  modified_base 7: mod_base = OTHER; note = Nucleotide with phosphorothioate linkage
  modified_base 8: mod_base = OTHER; note = Nucleotide with phosphorothioate linkage
  modified_base 9: mod_base = OTHER; note = Nucleotide with phosphorothioate linkage
  modified_base 10: mod_base = OTHER; note = Nucleotide with phosphorothioate linkage
  modified_base 11: mod_base = OTHER; note = Nucleotide with phosphorothioate linkage
  modified_base 12: mod_base = OTHER; note = Nucleotide with phosphorothioate linkage
  modified_base 13: mod_base = OTHER; note = Nucleotide with phosphorothioate linkage
  modified_base 14: mod_base = OTHER; note = 5-methyl beta-D-oxy locked nucleotide with phosphorothioate linkage
  modified_base 15: mod_base = OTHER; note = beta-D-oxy locked nucleotide with phosphorothioate linkage
  modified_base 16: mod_base = OTHER; note = beta-D-oxy locked nucleotide with phosphorothioate linkage
  modified_base 17: mod_base = OTHER; note = beta-D-oxy locked nucleotide with phosphorothioate linkage
tcttaatcatctccaaa

SEQ ID NO: 419 - DNA, 17 bp, synthetic construct
  source 1..17: mol_type = other DNA
  modified_base 1: mod_base = OTHER; note = beta-D-oxy locked nucleotide with phosphorothioate linkage
  modified_base 2: mod_base = OTHER; note = beta-D-oxy locked nucleotide with phosphorothioate linkage
  modified_base 3: mod_base = OTHER; note = beta-D-oxy locked nucleotide with phosphorothioate linkage
  modified_base 4: mod_base = OTHER; note = beta-D-oxy locked nucleotide with phosphorothioate linkage
  modified_base 5: mod_base = OTHER; note = Nucleotide with phosphorothioate linkage
  modified_base 6: mod_base = OTHER; note = Nucleotide with phosphorothioate linkage
  modified_base 7: mod_base = OTHER; note = Nucleotide with phosphorothioate linkage
  modified_base 8: mod_base = OTHER; note = Nucleotide with phosphorothioate linkage
  modified_base 9: mod_base = OTHER; note = Nucleotide with phosphorothioate linkage
  modified_base 10: mod_base = OTHER; note = Nucleotide with phosphorothioate linkage
  modified_base 11: mod_base = OTHER; note = Nucleotide with phosphorothioate linkage
  modified_base 12: mod_base = OTHER; note = Nucleotide with phosphorothioate linkage
  modified_base 13: mod_base = OTHER; note = Nucleotide with phosphorothioate linkage
  modified_base 14: mod_base = OTHER; note = 5-methyl beta-D-oxy locked nucleotide with phosphorothioate linkage
  modified_base 15: mod_base = OTHER; note = 5-methyl beta-D-oxy locked nucleotide with phosphorothioate linkage
  modified_base 16: mod_base = OTHER; note = beta-D-oxy locked nucleotide with phosphorothioate linkage
  modified_base 17: mod_base = OTHER; note = 5-methyl beta-D-oxy locked nucleotide with phosphorothioate linkage
taaaccaactttacctc

SEQ ID NO: 420 - DNA, 17 bp, synthetic construct
  source 1..17: mol_type = other DNA
  modified_base 1: mod_base = OTHER; note = beta-D-oxy locked nucleotide with phosphorothioate linkage
  modified_base 2: mod_base = OTHER; note = beta-D-oxy locked nucleotide with phosphorothioate linkage
  modified_base 3: mod_base = OTHER; note = beta-D-oxy locked nucleotide with phosphorothioate linkage
  modified_base 4: mod_base = OTHER; note = Nucleotide with phosphorothioate linkage
  modified_base 5: mod_base = OTHER; note = Nucleotide with phosphorothioate linkage
  modified_base 6: mod_base = OTHER; note = Nucleotide with phosphorothioate linkage
  modified_base 7: mod_base = OTHER; note = Nucleotide with phosphorothioate linkage
  modified_base 8: mod_base = OTHER; note = Nucleotide with phosphorothioate linkage
  modified_base 9: mod_base = OTHER; note = Nucleotide with phosphorothioate linkage
  modified_base 10: mod_base = OTHER; note = Nucleotide with phosphorothioate linkage
  modified_base 11: mod_base = OTHER; note = Nucleotide with phosphorothioate linkage
  modified_base 12: mod_base = OTHER; note = Nucleotide with phosphorothioate linkage
  modified_base 13: mod_base = OTHER; note = Nucleotide with phosphorothioate linkage
  modified_base 14: mod_base = OTHER; note = beta-D-oxy locked nucleotide with phosphorothioate linkage
  modified_base 15: mod_base = OTHER; note = beta-D-oxy locked nucleotide with phosphorothioate linkage
  modified_base 16: mod_base = OTHER; note = 5-methyl beta-D-oxy locked nucleotide with phosphorothioate linkage
  modified_base 17: mod_base = OTHER; note = 5-methyl beta-D-oxy locked nucleotide with phosphorothioate linkage
aataaaccaactttacc

SEQ ID NO: 421 - DNA, 17 bp, synthetic construct
  source 1..17: mol_type = other DNA
  modified_base 1: mod_base = OTHER; note = 5-methyl beta-D-oxy locked nucleotide with phosphorothioate linkage
  modified_base 2: mod_base = OTHER; note = beta-D-oxy locked nucleotide with phosphorothioate linkage
  modified_base 3: mod_base = OTHER; note = beta-D-oxy locked nucleotide with phosphorothioate linkage
  modified_base 4: mod_base = OTHER; note = beta-D-oxy locked nucleotide with phosphorothioate linkage
  modified_base 5: mod_base = OTHER; note = Nucleotide with phosphorothioate linkage
  modified_base 6: mod_base = OTHER; note = Nucleotide with phosphorothioate linkage
  modified_base 7: mod_base = OTHER; note = Nucleotide with phosphorothioate linkage
  modified_base 8: mod_base = OTHER; note = Nucleotide with phosphorothioate linkage
  modified_base 9: mod_base = OTHER; note = Nucleotide with phosphorothioate linkage
  modified_base 10: mod_base = OTHER; note = Nucleotide with phosphorothioate linkage
  modified_base 11: mod_base = OTHER; note = Nucleotide with phosphorothioate linkage
  modified_base 12: mod_base = OTHER; note = Nucleotide with phosphorothioate linkage
  modified_base 13: mod_base = OTHER; note = Nucleotide with phosphorothioate linkage
  modified_base 14: mod_base = OTHER; note = beta-D-oxy locked nucleotide with phosphorothioate linkage
  modified_base 15: mod_base = OTHER; note = beta-D-oxy locked nucleotide with phosphorothioate linkage
  modified_base 16: mod_base = OTHER; note = beta-D-oxy locked nucleotide with phosphorothioate linkage
  modified_base 17: mod_base = OTHER; note = 5-methyl beta-D-oxy locked nucleotide with phosphorothioate linkage
caataaaccaactttac

SEQ ID NO: 422 - DNA, 19 bp, synthetic construct
  source 1..19: mol_type = other DNA
  modified_base 1: mod_base = OTHER; note = beta-D-oxy locked nucleotide with phosphorothioate linkage
  modified_base 2: mod_base = OTHER; note = beta-D-oxy locked nucleotide with phosphorothioate linkage
  modified_base 3: mod_base = OTHER; note = beta-D-oxy locked nucleotide with phosphorothioate linkage
  modified_base 4: mod_base = OTHER; note = Nucleotide with phosphorothioate linkage
  modified_base 5: mod_base = OTHER; note = Nucleotide with phosphorothioate linkage
  modified_base 6: mod_base = OTHER; note = Nucleotide with phosphorothioate linkage
  modified_base 7: mod_base = OTHER; note = Nucleotide with phosphorothioate linkage
  modified_base 8: mod_base = OTHER; note = Nucleotide with phosphorothioate linkage
  modified_base 9: mod_base = OTHER; note = Nucleotide with phosphorothioate linkage
  modified_base 10: mod_base = OTHER; note = Nucleotide with phosphorothioate linkage
  modified_base 11: mod_base = OTHER; note = Nucleotide with phosphorothioate linkage
  modified_base 12: mod_base = OTHER; note = Nucleotide with phosphorothioate linkage
  modified_base 13: mod_base = OTHER; note = Nucleotide with phosphorothioate linkage
  modified_base 14: mod_base = OTHER; note = Nucleotide with phosphorothioate linkage
  modified_base 15: mod_base = OTHER; note = Nucleotide with phosphorothioate linkage
  modified_base 16: mod_base = OTHER; note = beta-D-oxy locked nucleotide with phosphorothioate linkage
  modified_base 17: mod_base = OTHER; note = 5-methyl beta-D-oxy locked nucleotide with phosphorothioate linkage
  modified_base 18: mod_base = OTHER; note = beta-D-oxy locked nucleotide with phosphorothioate linkage
  modified_base 19: mod_base = OTHER; note = beta-D-oxy locked nucleotide with phosphorothioate linkage
ttttccaataaaccaactt

SEQ ID NO: 423 - DNA, 17 bp, synthetic construct
  source 1..17: mol_type = other DNA
  modified_base 1: mod_base = OTHER; note = beta-D-oxy locked nucleotide with phosphorothioate linkage
  modified_base 2: mod_base = OTHER; note = beta-D-oxy locked nucleotide with phosphorothioate linkage
  modified_base 3: mod_base = OTHER; note = beta-D-oxy locked nucleotide with phosphorothioate linkage
  modified_base 4: mod_base = OTHER; note = beta-D-oxy locked nucleotide with phosphorothioate linkage
  modified_base 5: mod_base = OTHER; note = Nucleotide with phosphorothioate linkage
  modified_base 6: mod_base = OTHER; note = Nucleotide with phosphorothioate linkage
  modified_base 7: mod_base = OTHER; note = Nucleotide with phosphorothioate linkage
  modified_base 8: mod_base = OTHER; note = Nucleotide with phosphorothioate linkage
  modified_base 9: mod_base = OTHER; note = Nucleotide with phosphorothioate linkage
  modified_base 10: mod_base = OTHER; note = Nucleotide with phosphorothioate linkage
  modified_base 11: mod_base = OTHER; note = Nucleotide with phosphorothioate linkage
  modified_base 12: mod_base = OTHER; note = Nucleotide with phosphorothioate linkage
  modified_base 13: mod_base = OTHER; note = Nucleotide with phosphorothioate linkage
  modified_base 14: mod_base = OTHER; note = 5-methyl beta-D-oxy locked nucleotide with phosphorothioate linkage
  modified_base 15: mod_base = OTHER; note = beta-D-oxy locked nucleotide with phosphorothioate linkage
  modified_base 16: mod_base = OTHER; note = beta-D-oxy locked nucleotide with phosphorothioate linkage
  modified_base 17: mod_base = OTHER; note = 5-methyl beta-D-oxy locked nucleotide with phosphorothioate linkage
ttttccaataaaccaac

SEQ ID NO: 424 - DNA, 21 bp, synthetic construct
  source 1..21: mol_type = other DNA
  modified_base 1: mod_base = OTHER; note = 5-methyl beta-D-oxy locked nucleotide with phosphorothioate linkage
  modified_base 2: mod_base = OTHER; note = 5-methyl beta-D-oxy locked nucleotide with phosphorothioate linkage
  modified_base 3: mod_base = OTHER; note = Nucleotide with phosphorothioate linkage
  modified_base 4: mod_base = OTHER; note = Nucleotide with phosphorothioate linkage
  modified_base 5: mod_base = OTHER; note = Nucleotide with phosphorothioate linkage
  modified_base 6: mod_base = OTHER; note = Nucleotide with phosphorothioate linkage
  modified_base 7: mod_base = OTHER; note = Nucleotide with phosphorothioate linkage
  modified_base 8: mod_base = OTHER; note = Nucleotide with phosphorothioate linkage
  modified_base 9: mod_base = OTHER; note = Nucleotide with phosphorothioate linkage
  modified_base 10: mod_base = OTHER; note = Nucleotide with phosphorothioate linkage
  modified_base 11: mod_base = OTHER; note = Nucleotide with phosphorothioate linkage
  modified_base 12: mod_base = OTHER; note = Nucleotide with phosphorothioate linkage
  modified_base 13: mod_base = OTHER; note = Nucleotide with phosphorothioate linkage
  modified_base 14: mod_base = OTHER; note = Nucleotide with phosphorothioate linkage
  modified_base 15: mod_base = OTHER; note = Nucleotide with phosphorothioate linkage
  modified_base 16: mod_base = OTHER; note = Nucleotide with phosphorothioate linkage
  modified_base 17: mod_base = OTHER; note = Nucleotide with phosphorothioate linkage
  modified_base 18: mod_base = OTHER; note = Nucleotide with phosphorothioate linkage
  modified_base 19: mod_base = OTHER; note = Nucleotide with phosphorothioate linkage
  modified_base 20: mod_base = OTHER; note = beta-D-oxy locked nucleotide with phosphorothioate linkage
  modified_base 21: mod_base = OTHER; note = beta-D-oxy locked nucleotide with phosphorothioate linkage
ccctcttttccaataaaccaa

SEQ ID NO: 425 - DNA, 18 bp, synthetic construct
  source 1..18: mol_type = other DNA
  modified_base 1: mod_base = OTHER; note = 5-methyl beta-D-oxy locked nucleotide with phosphorothioate linkage
  modified_base 2: mod_base = OTHER; note = 5-methyl beta-D-oxy locked nucleotide with phosphorothioate linkage
  modified_base 3: mod_base = OTHER; note = 5-methyl beta-D-oxy locked nucleotide with phosphorothioate linkage
  modified_base 4: mod_base = OTHER; note = Nucleotide with phosphorothioate linkage
  modified_base 5: mod_base = OTHER; note = Nucleotide with phosphorothioate linkage
  modified_base 6: mod_base = OTHER; note = Nucleotide with phosphorothioate linkage
  modified_base 7: mod_base = OTHER; note = Nucleotide with phosphorothioate linkage
  modified_base 8: mod_base = OTHER; note = Nucleotide with phosphorothioate linkage
  modified_base 9: mod_base = OTHER; note = Nucleotide with phosphorothioate linkage
  modified_base 10: mod_base = OTHER; note = Nucleotide with phosphorothioate linkage
  modified_base 11: mod_base = OTHER; note = Nucleotide with phosphorothioate linkage
  modified_base 12: mod_base = OTHER; note = Nucleotide with phosphorothioate linkage
  modified_base 13: mod_base = OTHER; note = Nucleotide with phosphorothioate linkage
  modified_base 14: mod_base = OTHER; note = Nucleotide with phosphorothioate linkage
  modified_base 15: mod_base = OTHER; note = Nucleotide with phosphorothioate linkage
  modified_base 16: mod_base = OTHER; note = Nucleotide with phosphorothioate linkage
  modified_base 17: mod_base = OTHER; note = beta-D-oxy locked nucleotide with phosphorothioate linkage
  modified_base 18: mod_base = OTHER; note = 5-methyl beta-D-oxy locked nucleotide with phosphorothioate linkage
ccctcttttccaataaac

SEQ ID NO: 426 - DNA, 18 bp, synthetic construct
  source 1..18: mol_type = other DNA
  modified_base 1: mod_base = OTHER; note = beta-D-oxy locked nucleotide with phosphorothioate linkage
  modified_base 2: mod_base = OTHER; note = 5-methyl beta-D-oxy locked nucleotide with phosphorothioate linkage
  modified_base 3: mod_base = OTHER; note = 5-methyl beta-D-oxy locked nucleotide with phosphorothioate linkage
  modified_base 4: mod_base = OTHER; note = 5-methyl beta-D-oxy locked nucleotide with phosphorothioate linkage
  modified_base 5: mod_base = OTHER; note = Nucleotide with phosphorothioate linkage
  modified_base 6: mod_base = OTHER; note = Nucleotide with phosphorothioate linkage
  modified_base 7: mod_base = OTHER; note = Nucleotide with phosphorothioate linkage
  modified_base 8: mod_base = OTHER; note = Nucleotide with phosphorothioate linkage
  modified_base 9: mod_base = OTHER; note = Nucleotide with phosphorothioate linkage
  modified_base 10: mod_base = OTHER; note = Nucleotide with phosphorothioate linkage
  modified_base 11: mod_base = OTHER; note = Nucleotide with phosphorothioate linkage
  modified_base 12: mod_base = OTHER; note = Nucleotide with phosphorothioate linkage
  modified_base 13: mod_base = OTHER; note = Nucleotide with phosphorothioate linkage
  modified_base 14: mod_base = OTHER; note = Nucleotide with phosphorothioate linkage
  modified_base 15: mod_base = OTHER; note = Nucleotide with phosphorothioate linkage
  modified_base 16: mod_base = OTHER; note = Nucleotide with phosphorothioate linkage
  modified_base 17: mod_base = OTHER; note = beta-D-oxy locked nucleotide with phosphorothioate linkage
  modified_base 18: mod_base = OTHER; note = beta-D-oxy locked nucleotide with phosphorothioate linkage
tccctcttttccaataaa

SEQ ID NO: 427 - DNA, 17 bp, synthetic construct
  source 1..17: mol_type = other DNA
  modified_base 1: mod_base = OTHER; note = beta-D-oxy locked nucleotide with phosphorothioate linkage
  modified_base 2: mod_base = OTHER; note = beta-D-oxy locked nucleotide with phosphorothioate linkage
  modified_base 3: mod_base = OTHER; note = Nucleotide with phosphorothioate linkage
  modified_base 4: mod_base = OTHER; note = Nucleotide with phosphorothioate linkage
  modified_base 5: mod_base = OTHER; note = Nucleotide with phosphorothioate linkage
  modified_base 6: mod_base = OTHER; note = Nucleotide with phosphorothioate linkage
  modified_base 7: mod_base = OTHER; note = Nucleotide with phosphorothioate linkage
  modified_base 8: mod_base = OTHER; note = Nucleotide with phosphorothioate linkage
  modified_base 9: mod_base = OTHER; note = Nucleotide with phosphorothioate linkage
  modified_base 10: mod_base = OTHER; note = Nucleotide with phosphorothioate linkage
  modified_base 11: mod_base = OTHER; note = Nucleotide with phosphorothioate linkage
  modified_base 12: mod_base = OTHER; note = Nucleotide with phosphorothioate linkage
  modified_base 13: mod_base = OTHER; note = Nucleotide with phosphorothioate linkage
  modified_base 14: mod_base = OTHER; note = Nucleotide with phosphorothioate linkage
  modified_base 15: mod_base = OTHER; note = beta-D-oxy locked nucleotide with phosphorothioate linkage
  modified_base 16: mod_base = OTHER; note = beta-D-oxy locked nucleotide with phosphorothioate linkage
  modified_base 17: mod_base = OTHER; note = beta-D-oxy locked nucleotide with phosphorothioate linkage
attacccacaatgctat

SEQ ID NO: 428 - DNA, 16 bp, synthetic construct
  source 1..16: mol_type = other DNA
  modified_base 1: mod_base = OTHER; note = 5-methyl beta-D-oxy locked nucleotide with phosphorothioate linkage
  modified_base 2: mod_base = OTHER; note = 5-methyl beta-D-oxy locked nucleotide with phosphorothioate linkage
  modified_base 3: mod_base = OTHER; note = beta-D-oxy locked nucleotide with phosphorothioate linkage
  modified_base 4: mod_base = OTHER; note = Nucleotide with phosphorothioate linkage
  modified_base 5: mod_base = OTHER; note = Nucleotide with phosphorothioate linkage
  modified_base 6: mod_base = OTHER; note = Nucleotide with phosphorothioate linkage
  modified_base 7: mod_base = OTHER; note = Nucleotide with phosphorothioate linkage
  modified_base 8: mod_base = OTHER; note = Nucleotide with phosphorothioate linkage
  modified_base 9: mod_base = OTHER; note = Nucleotide with phosphorothioate linkage
  modified_base 10: mod_base = OTHER; note = Nucleotide with phosphorothioate linkage
  modified_base 11: mod_base = OTHER; note = Nucleotide with phosphorothioate linkage
  modified_base 12: mod_base = OTHER; note = Nucleotide with phosphorothioate linkage
  modified_base 13: mod_base = OTHER; note = Nucleotide with phosphorothioate linkage
  modified_base 14: mod_base = OTHER; note = Nucleotide with phosphorothioate linkage
  modified_base 15: mod_base = OTHER; note = 5-methyl beta-D-oxy locked nucleotide with phosphorothioate linkage
  modified_base 16: mod_base = OTHER; note = 5-methyl beta-D-oxy locked nucleotide with phosphorothioate linkage
ccatgaagcaattacc

SEQ ID NO: 429 - DNA, 17 bp, synthetic construct
  source 1..17: mol_type = other DNA
  modified_base 1: mod_base = OTHER; note = 5-methyl beta-D-oxy locked nucleotide with phosphorothioate linkage
  modified_base 2: mod_base = OTHER; note = beta-D-oxy locked nucleotide with phosphorothioate linkage
  modified_base 3: mod_base = OTHER; note = Nucleotide with phosphorothioate linkage
  modified_base 4: mod_base = OTHER; note = Nucleotide with phosphorothioate linkage
  modified_base 5: mod_base = OTHER; note = Nucleotide with phosphorothioate linkage
  modified_base 6: mod_base = OTHER; note = Nucleotide with phosphorothioate linkage
  modified_base 7: mod_base = OTHER; note = Nucleotide with phosphorothioate linkage
  modified_base 8: mod_base = OTHER; note = Nucleotide with phosphorothioate linkage
  modified_base 9: mod_base = OTHER; note = Nucleotide with phosphorothioate linkage
  modified_base 10: mod_base = OTHER; note = Nucleotide with phosphorothioate linkage
  modified_base 11: mod_base = OTHER; note = Nucleotide with phosphorothioate linkage
  modified_base 12: mod_base = OTHER; note = Nucleotide with phosphorothioate linkage
  modified_base 13: mod_base = OTHER; note = Nucleotide with phosphorothioate linkage
  modified_base 14: mod_base = OTHER; note = Nucleotide with phosphorothioate linkage
  modified_base 15: mod_base = OTHER; note = Nucleotide with phosphorothioate linkage
  modified_base 16: mod_base = OTHER; note = beta-D-oxy locked nucleotide with phosphorothioate linkage
  modified_base 17: mod_base = OTHER; note = 5-methyl beta-D-oxy locked nucleotide with phosphorothioate linkage
cagactagcctaccatc

SEQ ID NO: 430 - DNA, 16 bp, synthetic construct
  source 1..16: mol_type = other DNA
  modified_base 1: mod_base = OTHER; note = beta-D-oxy locked nucleotide with phosphorothioate linkage
  modified_base 2: mod_base = OTHER; note = beta-D-oxy locked nucleotide with phosphorothioate linkage
  modified_base 3: mod_base = OTHER; note = 5-methyl beta-D-oxy locked nucleotide with phosphorothioate linkage
  modified_base 4: mod_base = OTHER; note = 5-methyl beta-D-oxy locked nucleotide with phosphorothioate linkage
  modified_base 5: mod_base = OTHER; note = Nucleotide with phosphorothioate linkage
  modified_base 6: mod_base = OTHER; note = Nucleotide with phosphorothioate linkage
  modified_base 7: mod_base = OTHER; note = Nucleotide with phosphorothioate linkage
  modified_base 8: mod_base = OTHER; note = Nucleotide with phosphorothioate linkage
  modified_base 9: mod_base = OTHER; note = Nucleotide with phosphorothioate linkage
  modified_base 10: mod_base = OTHER; note = Nucleotide with phosphorothioate linkage
  modified_base 11: mod_base = OTHER; note = Nucleotide with phosphorothioate linkage
  modified_base 12: mod_base = OTHER; note = Nucleotide with phosphorothioate linkage
  modified_base 13: mod_base = OTHER; note = Nucleotide with phosphorothioate linkage
  modified_base 14: mod_base = OTHER; note = Nucleotide with phosphorothioate linkage
  modified_base 15: mod_base = OTHER; note = beta-D-oxy locked nucleotide with phosphorothioate linkage
  modified_base 16: mod_base = OTHER; note = 5-methyl beta-D-oxy locked nucleotide with phosphorothioate linkage
ttccttacctcataac

SEQ ID NO: 431 - DNA, 19 bp, synthetic construct
  source 1..19: mol_type = other DNA
  modified_base 1: mod_base = OTHER; note = beta-D-oxy locked nucleotide with phosphorothioate linkage
  modified_base 2: mod_base = OTHER; note = beta-D-oxy locked nucleotide with phosphorothioate linkage
  modified_base 3: mod_base = OTHER; note = Nucleotide with phosphorothioate linkage
  modified_base 4: mod_base = OTHER; note = Nucleotide with phosphorothioate linkage
  modified_base 5: mod_base = OTHER; note = Nucleotide with phosphorothioate linkage
  modified_base 6: mod_base = OTHER; note = Nucleotide with phosphorothioate linkage
  modified_base 7: mod_base = OTHER; note = Nucleotide with phosphorothioate linkage
  modified_base 8: mod_base = OTHER; note = Nucleotide with phosphorothioate linkage
  modified_base 9: mod_base = OTHER; note = Nucleotide with phosphorothioate linkage
  modified_base 10: mod_base = OTHER; note = Nucleotide with phosphorothioate linkage
  modified_base 11: mod_base = OTHER; note = Nucleotide with phosphorothioate linkage
  modified_base 12: mod_base = OTHER; note = Nucleotide with phosphorothioate linkage
  modified_base 13: mod_base = OTHER; note = Nucleotide with phosphorothioate linkage
  modified_base 14: mod_base = OTHER; note = Nucleotide with phosphorothioate linkage
  modified_base 15: mod_base = OTHER; note = Nucleotide with phosphorothioate linkage
  modified_base 16: mod_base = OTHER; note = Nucleotide with phosphorothioate linkage
  modified_base 17: mod_base = OTHER; note = Nucleotide with phosphorothioate linkage
  modified_base 18: mod_base = OTHER; note = 5-methyl beta-D-oxy locked nucleotide with phosphorothioate linkage
  modified_base 19: mod_base = OTHER; note = beta-D-oxy locked nucleotide with phosphorothioate linkage
tgaacacatctccactaca

SEQ ID NO: 432 - DNA, 17 bp, synthetic construct
  source 1..17: mol_type = other DNA
  modified_base 1: mod_base = OTHER; note = beta-D-oxy locked nucleotide with phosphorothioate linkage
  modified_base 2: mod_base = OTHER; note = beta-D-oxy locked nucleotide with phosphorothioate linkage
  modified_base 3: mod_base = OTHER; note = 5-methyl beta-D-oxy locked nucleotide with phosphorothioate linkage
  modified_base 4: mod_base = OTHER; note = Nucleotide with phosphorothioate linkage
  modified_base 5: mod_base = OTHER; note = Nucleotide with phosphorothioate linkage
  modified_base 6: mod_base = OTHER; note = Nucleotide with phosphorothioate linkage
  modified_base 7: mod_base = OTHER; note = Nucleotide with phosphorothioate linkage
  modified_base 8: mod_base = OTHER; note = Nucleotide with phosphorothioate linkage
  modified_base 9: mod_base = OTHER; note = Nucleotide with phosphorothioate linkage
  modified_base 10: mod_base = OTHER; note = Nucleotide with phosphorothioate linkage
  modified_base 11: mod_base = OTHER; note = Nucleotide with phosphorothioate linkage
  modified_base 12: mod_base = OTHER; note = Nucleotide with phosphorothioate linkage
  modified_base 13: mod_base = OTHER; note = Nucleotide with phosphorothioate linkage
  modified_base 14: mod_base = OTHER; note = Nucleotide with phosphorothioate linkage
  modified_base 15: mod_base = OTHER; note = Nucleotide with phosphorothioate linkage
  modified_base 16: mod_base = OTHER; note = 5-methyl beta-D-oxy locked nucleotide with phosphorothioate linkage
  modified_base 17: mod_base = OTHER; note = beta-D-oxy locked nucleotide with phosphorothioate linkage
aacacatctccactaca

SEQ ID NO: 433 - DNA, 17 bp, synthetic construct
  source 1..17: mol_type = other DNA
  modified_base 1: mod_base = OTHER; note = beta-D-oxy locked nucleotide with phosphorothioate linkage
  modified_base 2: mod_base = OTHER; note = beta-D-oxy locked nucleotide with phosphorothioate linkage
  modified_base 3: mod_base = OTHER; note = beta-D-oxy locked nucleotide with phosphorothioate linkage
  modified_base 4: mod_base = OTHER; note = Nucleotide with phosphorothioate linkage
  modified_base 5: mod_base = OTHER; note = Nucleotide with phosphorothioate linkage
  modified_base 6: mod_base = OTHER; note = Nucleotide with phosphorothioate linkage
  modified_base 7: mod_base = OTHER; note = Nucleotide with phosphorothioate linkage
  modified_base 8: mod_base = OTHER; note = Nucleotide with phosphorothioate linkage
  modified_base 9: mod_base = OTHER; note = Nucleotide with phosphorothioate linkage
  modified_base 10: mod_base = OTHER; note = Nucleotide with phosphorothioate linkage
  modified_base 11: mod_base = OTHER; note = Nucleotide with phosphorothioate linkage
  modified_base 12: mod_base = OTHER; note = Nucleotide with phosphorothioate linkage
  modified_base 13: mod_base = OTHER; note = Nucleotide with phosphorothioate linkage
  modified_base 14: mod_base = OTHER; note = Nucleotide with phosphorothioate linkage
  modified_base 15: mod_base = OTHER; note = Nucleotide with phosphorothioate linkage
  modified_base 16: mod_base = OTHER; note = 5-methyl beta-D-oxy locked nucleotide with phosphorothioate linkage
  modified_base 17: mod_base = OTHER; note = 5-methyl beta-D-oxy locked nucleotide with phosphorothioate linkage
aatctggtattcacacc

SEQ ID NO: 434 - DNA, 20 bp, synthetic construct
  source 1..20: mol_type = other DNA
  modified_base 1: mod_base = OTHER; note = 5-methyl beta-D-oxy locked nucleotide with phosphorothioate linkage
  modified_base 2: mod_base = OTHER; note = beta-D-oxy locked nucleotide with phosphorothioate linkage
  modified_base 3: mod_base = OTHER; note = Nucleotide with phosphorothioate linkage
  modified_base 4: mod_base = OTHER; note = Nucleotide with phosphorothioate linkage
  modified_base 5: mod_base = OTHER; note = Nucleotide with phosphorothioate linkage
  modified_base 6: mod_base = OTHER; note = Nucleotide with phosphorothioate linkage
  modified_base 7: mod_base = OTHER; note = Nucleotide with phosphorothioate linkage
  modified_base 8: mod_base = OTHER; note = Nucleotide with phosphorothioate linkage
  modified_base 9: mod_base = OTHER; note = Nucleotide with phosphorothioate linkage
  modified_base 10: mod_base = OTHER; note = Nucleotide with phosphorothioate linkage
  modified_base 11: mod_base = OTHER; note = Nucleotide with phosphorothioate linkage
  modified_base 12: mod_base = OTHER; note = Nucleotide with phosphorothioate linkage
  modified_base 13: mod_base = OTHER; note = Nucleotide with phosphorothioate linkage
  modified_base 14: mod_base = OTHER; note = Nucleotide with phosphorothioate linkage
  modified_base 15: mod_base = OTHER; note = Nucleotide with phosphorothioate linkage
  modified_base 16: mod_base = OTHER; note = Nucleotide with phosphorothioate linkage
  modified_base 17: mod_base = OTHER; note = Nucleotide with phosphorothioate linkage
  modified_base 18: mod_base = OTHER; note = Nucleotide with phosphorothioate linkage
  modified_base 19: mod_base = OTHER; note = 5-methyl beta-D-oxy locked nucleotide with phosphorothioate linkage
  modified_base 20: mod_base = OTHER; note = beta-D-oxy locked nucleotide with phosphorothioate linkage
cacatcaaaatcttctctct

SEQ ID NO: 435 - DNA, 18 bp, synthetic construct
  source 1..18: mol_type = other DNA
  modified_base 1: mod_base = OTHER; note = 5-methyl beta-D-oxy locked nucleotide with phosphorothioate linkage
  modified_base 2: mod_base = OTHER; note = beta-D-oxy locked nucleotide with phosphorothioate linkage
  modified_base 3: mod_base = OTHER; note = Nucleotide with phosphorothioate linkage
  modified_base 4: mod_base = OTHER; note = Nucleotide with phosphorothioate linkage
  modified_base 5: mod_base = OTHER; note = Nucleotide with phosphorothioate linkage
  modified_base 6: mod_base = OTHER; note = Nucleotide with phosphorothioate linkage
  modified_base 7: mod_base = OTHER; note = Nucleotide with phosphorothioate linkage
  modified_base 8: mod_base = OTHER; note = Nucleotide with phosphorothioate linkage
  modified_base 9: mod_base = OTHER; note = Nucleotide with phosphorothioate linkage
  modified_base 10: mod_base = OTHER; note = Nucleotide with phosphorothioate linkage
  modified_base 11: mod_base = OTHER; note = Nucleotide with phosphorothioate linkage
  modified_base 12: mod_base = OTHER; note = Nucleotide with phosphorothioate linkage
  modified_base 13: mod_base = OTHER; note = Nucleotide with phosphorothioate linkage
  modified_base 14: mod_base = OTHER; note = Nucleotide with phosphorothioate linkage
  modified_base 15: mod_base = OTHER; note = Nucleotide with phosphorothioate linkage
  modified_base 16: mod_base = OTHER; note = Nucleotide with phosphorothioate linkage
  modified_base 17: mod_base = OTHER; note = 5-methyl beta-D-oxy locked nucleotide with phosphorothioate linkage
  modified_base 18: mod_base = OTHER; note = beta-D-oxy locked nucleotide with phosphorothioate linkage
catcaaaatcttctctct

SEQ ID NO: 436 - DNA, 18 bp, synthetic construct
  source 1..18: mol_type = other DNA
  modified_base 1: mod_base = OTHER; note = beta-D-oxy locked nucleotide with phosphorothioate linkage
  modified_base 2: mod_base = OTHER; note = 5-methyl beta-D-oxy locked nucleotide with phosphorothioate linkage
  modified_base 3: mod_base = OTHER; note = Nucleotide with phosphorothioate linkage
  modified_base 4: mod_base = OTHER; note = Nucleotide with phosphorothioate linkage
  modified_base 5: mod_base = OTHER; note = Nucleotide with phosphorothioate linkage
  modified_base 6: mod_base = OTHER; note = Nucleotide with phosphorothioate linkage
  modified_base 7: mod_base = OTHER; note = Nucleotide with phosphorothioate linkage
  modified_base 8: mod_base = OTHER; note = Nucleotide with phosphorothioate linkage
  modified_base 9: mod_base = OTHER; note = Nucleotide with phosphorothioate linkage
  modified_base 10: mod_base = OTHER; note = Nucleotide with phosphorothioate linkage
  modified_base 11: mod_base = OTHER; note = Nucleotide with phosphorothioate linkage
  modified_base 12: mod_base = OTHER; note = Nucleotide with phosphorothioate linkage
  modified_base 13: mod_base = OTHER; note = Nucleotide with phosphorothioate linkage
  modified_base 14: mod_base = OTHER; note = Nucleotide with phosphorothioate linkage
  modified_base 15: mod_base = OTHER; note = beta-D-oxy locked nucleotide with phosphorothioate linkage
  modified_base 16: mod_base = OTHER; note = beta-D-oxy locked nucleotide with phosphorothioate linkage
  modified_base 17: mod_base = OTHER; note = 5-methyl beta-D-oxy locked nucleotide with phosphorothioate linkage
  modified_base 18: mod_base = OTHER; note = beta-D-oxy locked nucleotide with phosphorothioate linkage
tccacatcaaaatcttct

SEQ ID NO: 437 - DNA, 18 bp, synthetic construct
  source 1..18: mol_type = other DNA
  modified_base 1: mod_base = OTHER; note = beta-D-oxy locked nucleotide with phosphorothioate linkage
  modified_base 2: mod_base = OTHER; note = 5-methyl beta-D-oxy locked nucleotide with phosphorothioate linkage
  modified_base 3: mod_base = OTHER; note = Nucleotide with phosphorothioate linkage
  modified_base 4: mod_base = OTHER; note = Nucleotide with phosphorothioate linkage
  modified_base 5: mod_base = OTHER; note = Nucleotide with phosphorothioate linkage
  modified_base 6: mod_base = OTHER; note = Nucleotide with phosphorothioate linkage
  modified_base 7: mod_base = OTHER; note = Nucleotide with phosphorothioate linkage
  modified_base 8: mod_base = OTHER; note = Nucleotide with phosphorothioate linkage
  modified_base 9: mod_base = OTHER; note = Nucleotide with phosphorothioate linkage
  modified_base 10: mod_base = OTHER; note = Nucleotide with phosphorothioate linkage
  modified_base 11: mod_base = OTHER; note = Nucleotide with phosphorothioate linkage
  modified_base 12: mod_base = OTHER; note = Nucleotide with phosphorothioate linkage
  modified_base 13: mod_base = OTHER; note = Nucleotide with phosphorothioate linkage
  modified_base 14: mod_base = OTHER; note = Nucleotide with phosphorothioate linkage
  modified_base 15: mod_base = OTHER; note = Nucleotide with phosphorothioate linkage
  modified_base 16: mod_base = OTHER; note = Nucleotide with phosphorothioate linkage
  modified_base 17: mod_base = OTHER; note = beta-D-oxy locked nucleotide with phosphorothioate linkage
  modified_base 18: mod_base = OTHER; note = beta-D-oxy locked nucleotide with phosphorothioate linkage
gctccacatcaaaatctt

SEQ ID NO: 438 - DNA, 16 bp, synthetic construct
  source 1..16: mol_type = other DNA
  modified_base 1: mod_base = OTHER; note = beta-D-oxy locked nucleotide with phosphorothioate linkage
  modified_base 2: mod_base = OTHER; note = 5-methyl beta-D-oxy locked nucleotide with phosphorothioate linkage
  modified_base 3: mod_base = OTHER; note = beta-D-oxy locked nucleotide with phosphorothioate linkage
  modified_base 4: mod_base = OTHER; note = 5-methyl beta-D-oxy locked nucleotide with phosphorothioate linkage
  modified_base 5: mod_base = OTHER; note = Nucleotide with phosphorothioate linkage
  modified_base 6: mod_base = OTHER; note = Nucleotide with phosphorothioate linkage
  modified_base 7: mod_base = OTHER; note = Nucleotide with phosphorothioate linkage
  modified_base 8: mod_base = OTHER; note = Nucleotide with phosphorothioate linkage
  modified_base 9: mod_base = OTHER; note = Nucleotide with phosphorothioate linkage
  modified_base 10: mod_base = OTHER; note = Nucleotide with phosphorothioate linkage
  modified_base 11: mod_base = OTHER; note = Nucleotide with phosphorothioate linkage
  modified_base 12: mod_base = OTHER; note = Nucleotide with phosphorothioate linkage
  modified_base 13: mod_base = OTHER; note = beta-D-oxy locked nucleotide with phosphorothioate linkage
  modified_base 14: mod_base = OTHER; note = beta-D-oxy locked nucleotide with phosphorothioate linkage
  modified_base 15: mod_base = OTHER; note = beta-D-oxy locked nucleotide with phosphorothioate linkage
  modified_base 16: mod_base = OTHER; note = 5-methyl beta-D-oxy locked nucleotide with phosphorothioate linkage
gctccacatcaaaatc

SEQ ID NO: 439 - DNA, 16 bp, synthetic construct
  source 1..16: mol_type = other DNA
  modified_base 1: mod_base = OTHER; note = beta-D-oxy locked nucleotide with phosphorothioate linkage
  modified_base 2: mod_base = OTHER; note = beta-D-oxy locked nucleotide with phosphorothioate linkage
  modified_base 3: mod_base = OTHER; note = 5-methyl beta-D-oxy locked nucleotide with phosphorothioate linkage
  modified_base 4: mod_base = OTHER; note = beta-D-oxy locked nucleotide with phosphorothioate linkage
  modified_base 5: mod_base = OTHER; note = Nucleotide with phosphorothioate linkage
  modified_base 6: mod_base = OTHER; note = Nucleotide with phosphorothioate linkage
  modified_base 7: mod_base = OTHER; note = Nucleotide with phosphorothioate linkage
  modified_base 8: mod_base = OTHER; note = Nucleotide with phosphorothioate linkage
  modified_base 9: mod_base = OTHER; note = Nucleotide with phosphorothioate linkage
  modified_base 10: mod_base = OTHER; note = Nucleotide with phosphorothioate linkage
  modified_base 11: mod_base = OTHER; note = Nucleotide with phosphorothioate linkage
  modified_base 12: mod_base = OTHER; note = Nucleotide with phosphorothioate linkage
  modified_base 13: mod_base = OTHER; note = beta-D-oxy locked nucleotide with phosphorothioate linkage
  modified_base 14: mod_base = OTHER; note = beta-D-oxy locked nucleotide with phosphorothioate linkage
  modified_base 15: mod_base = OTHER; note = 5-methyl beta-D-oxy locked nucleotide with phosphorothioate linkage
  modified_base 16: mod_base = OTHER; note = beta-D-oxy locked nucleotide with phosphorothioate linkage
aacgcacagttaaact

SEQ ID NO: 440 - DNA, 17 bp, synthetic construct
  source 1..17: mol_type = other DNA
  modified_base 1: mod_base = OTHER; note = beta-D-oxy locked nucleotide with phosphorothioate linkage
  modified_base 2: mod_base = OTHER; note = beta-D-oxy locked nucleotide with phosphorothioate linkage
  modified_base 3: mod_base = OTHER; note = 5-methyl beta-D-oxy locked nucleotide with phosphorothioate linkage
  modified_base 4: mod_base = OTHER; note = Nucleotide with phosphorothioate linkage
  modified_base 5: mod_base = OTHER; note = Nucleotide with phosphorothioate linkage
  modified_base 6: mod_base = OTHER; note = Nucleotide with phosphorothioate linkage
  modified_base 7: mod_base = OTHER; note = Nucleotide with phosphorothioate linkage
  modified_base 8: mod_base = OTHER; note = Nucleotide with phosphorothioate linkage
  modified_base 9: mod_base = OTHER; note = Nucleotide with phosphorothioate linkage
  modified_base 10: mod_base = OTHER; note = Nucleotide with phosphorothioate linkage
  modified_base 11: mod_base = OTHER; note = Nucleotide with phosphorothioate linkage
  modified_base 12: mod_base = OTHER; note = Nucleotide with phosphorothioate linkage
  modified_base 13: mod_base = OTHER; note = Nucleotide with phosphorothioate linkage
  modified_base 14: mod_base = OTHER; note = 5-methyl beta-D-oxy locked nucleotide with phosphorothioate linkage
  modified_base 15: mod_base = OTHER; note = beta-D-oxy locked nucleotide with phosphorothioate linkage
  modified_base 16: mod_base = OTHER; note = beta-D-oxy locked nucleotide with phosphorothioate linkage
  modified_base 17: mod_base = OTHER; note = 5-methyl beta-D-oxy locked nucleotide with phosphorothioate linkage
agctcattatctacaac

SEQ ID NO: 441 - DNA, 16 bp, synthetic construct
  source 1..16: mol_type = other DNA
  modified_base 1: mod_base = OTHER; note = beta-D-oxy locked nucleotide with phosphorothioate linkage
  modified_base 2: mod_base = OTHER; note = 5-methyl beta-D-oxy locked nucleotide with phosphorothioate linkage
  modified_base 3: mod_base = OTHER; note = Nucleotide with phosphorothioate linkage
  modified_base 4: mod_base = OTHER; note = Nucleotide with phosphorothioate linkage
  modified_base 5: mod_base = OTHER; note = Nucleotide with phosphorothioate linkage
  modified_base 6: mod_base = OTHER; note = Nucleotide with phosphorothioate linkage
  modified_base 7: mod_base = OTHER; note = Nucleotide with phosphorothioate linkage
  modified_base 8: mod_base = OTHER; note = Nucleotide with phosphorothioate linkage
  modified_base 9: mod_base = OTHER; note = Nucleotide with phosphorothioate linkage
  modified_base 10: mod_base = OTHER; note = Nucleotide with phosphorothioate linkage
  modified_base 11: mod_base = OTHER; note = Nucleotide with phosphorothioate linkage
  modified_base 12: mod_base = OTHER; note = Nucleotide with phosphorothioate linkage
  modified_base 13: mod_base = OTHER; note = 5-methyl beta-D-oxy locked nucleotide with phosphorothioate linkage
  modified_base 14: mod_base = OTHER; note = beta-D-oxy locked nucleotide with phosphorothioate linkage
  modified_base 15: mod_base = OTHER; note = beta-D-oxy locked nucleotide with phosphorothioate linkage
  modified_base 16: mod_base = OTHER; note = 5-methyl beta-D-oxy locked nucleotide with phosphorothioate linkage
gctcattatctacaac

SEQ ID NO: 442 - DNA, 17 bp, synthetic construct
  source 1..17: mol_type = other DNA
  modified_base 1: mod_base = OTHER; note = beta-D-oxy locked nucleotide with phosphorothioate linkage
  modified_base 2: mod_base = OTHER; note = 5-methyl beta-D-oxy locked nucleotide with phosphorothioate linkage
  modified_base 3: mod_base = OTHER; note = Nucleotide with phosphorothioate linkage
  modified_base 4: mod_base = OTHER; note = Nucleotide with phosphorothioate linkage
  modified_base 5: mod_base = OTHER; note = Nucleotide with phosphorothioate linkage
  modified_base 6: mod_base = OTHER; note = Nucleotide with phosphorothioate linkage
  modified_base 7: mod_base = OTHER; note = Nucleotide with phosphorothioate linkage
  modified_base 8: mod_base = OTHER; note = Nucleotide with phosphorothioate linkage
  modified_base 9: mod_base = OTHER; note = Nucleotide with phosphorothioate linkage
  modified_base 10: mod_base = OTHER; note = Nucleotide with phosphorothioate linkage
  modified_base 11: mod_base = OTHER; note = Nucleotide with phosphorothioate linkage
  modified_base 12: mod_base = OTHER; note = Nucleotide with phosphorothioate linkage
  modified_base 13: mod_base = OTHER; note = Nucleotide with phosphorothioate linkage
  modified_base 14: mod_base = OTHER; note = Nucleotide with phosphorothioate linkage
  modified_base 15: mod_base = OTHER; note = 5-methyl beta-D-oxy locked nucleotide with phosphorothioate linkage
  modified_base 16: mod_base = OTHER; note = beta-D-oxy locked nucleotide with phosphorothioate linkage
  modified_base 17: mod_base = OTHER; note = beta-D-oxy locked nucleotide with phosphorothioate linkage
accaagctcattatcta

SEQ ID NO: 443 - DNA, 17 bp, synthetic construct
  source 1..17: mol_type = other DNA
  modified_base 1: mod_base = OTHER; note = beta-D-oxy locked nucleotide with phosphorothioate linkage
  modified_base 2: mod_base = OTHER; note = beta-D-oxy locked nucleotide with phosphorothioate linkage
  modified_base 3: mod_base = OTHER; note = Nucleotide with phosphorothioate linkage
  modified_base 4: mod_base = OTHER; note = Nucleotide with phosphorothioate linkage
  modified_base 5: mod_base = OTHER; note = Nucleotide with phosphorothioate linkage
  modified_base 6: mod_base = OTHER; note = Nucleotide with phosphorothioate linkage
  modified_base 7: mod_base = OTHER; note = Nucleotide with phosphorothioate linkage
  modified_base 8: mod_base = OTHER; note = Nucleotide with phosphorothioate linkage
  modified_base 9: mod_base = OTHER; note = Nucleotide with phosphorothioate linkage
  modified_base 10: mod_base = OTHER; note = Nucleotide with phosphorothioate linkage
  modified_base 11: mod_base = OTHER; note = Nucleotide with phosphorothioate linkage
  modified_base 12: mod_base = OTHER; note = Nucleotide with phosphorothioate linkage
  modified_base 13: mod_base = OTHER; note = Nucleotide with phosphorothioate linkage
  modified_base 14: mod_base = OTHER; note = Nucleotide with phosphorothioate linkage
  modified_base 15: mod_base = OTHER; note = beta-D-oxy locked nucleotide with phosphorothioate linkage
  modified_base 16: mod_base = OTHER; note = 5-methyl beta-D-oxy locked nucleotide with phosphorothioate linkage
  modified_base 17: mod_base = OTHER; note = beta-D-oxy locked nucleotide with phosphorothioate linkage
aaccaagctcattatct

SEQ ID NO: 444 - DNA, 16 bp, synthetic construct
  source 1..16: mol_type = other DNA
  modified_base 1: mod_base = OTHER; note = beta-D-oxy locked nucleotide with phosphorothioate linkage
  modified_base 2: mod_base = OTHER; note = 5-methyl beta-D-oxy locked nucleotide with phosphorothioate linkage
  modified_base 3: mod_base = OTHER; note = Nucleotide with phosphorothioate linkage
  modified_base 4: mod_base = OTHER; note = Nucleotide with phosphorothioate linkage
  modified_base 5: mod_base = OTHER; note = Nucleotide with phosphorothioate linkage
  modified_base 6: mod_base = OTHER; note = Nucleotide with phosphorothioate linkage
  modified_base 7: mod_base = OTHER; note = Nucleotide with phosphorothioate linkage
  modified_base 8: mod_base = OTHER; note = Nucleotide with phosphorothioate linkage
  modified_base 9: mod_base = OTHER; note = Nucleotide with phosphorothioate linkage
  modified_base 10: mod_base = OTHER; note = Nucleotide with phosphorothioate linkage
  modified_base 11: mod_base = OTHER; note = Nucleotide with phosphorothioate linkage
  modified_base 12: mod_base = OTHER; note = Nucleotide with phosphorothioate linkage
  modified_base 13: mod_base = OTHER; note = beta-D-oxy locked nucleotide with phosphorothioate linkage
  modified_base 14: mod_base = OTHER; note = beta-D-oxy locked nucleotide with phosphorothioate linkage
  modified_base 15: mod_base = OTHER; note = beta-D-oxy locked nucleotide with phosphorothioate linkage
  modified_base 16: mod_base = OTHER; note = beta-D-oxy locked nucleotide with phosphorothioate linkage
gcctcagcaatctaaa

SEQ ID NO: 445 - DNA, 16 bp, synthetic construct
  source 1..16: mol_type = other DNA
  modified_base 1: mod_base = OTHER; note = 5-methyl beta-D-oxy locked nucleotide with phosphorothioate linkage
  modified_base 2: mod_base = OTHER; note = beta-D-oxy locked nucleotide with phosphorothioate linkage
  modified_base 3: mod_base = OTHER; note = beta-D-oxy locked nucleotide with phosphorothioate linkage
  modified_base 4: mod_base = OTHER; note = beta-D-oxy locked nucleotide with phosphorothioate linkage
  modified_base 5: mod_base = OTHER; note = Nucleotide with phosphorothioate linkage
  modified_base 6: mod_base = OTHER; note = Nucleotide with phosphorothioate linkage
  modified_base 7: mod_base = OTHER; note = Nucleotide with phosphorothioate linkage
  modified_base 8: mod_base = OTHER; note = Nucleotide with phosphorothioate linkage
  modified_base 9: mod_base = OTHER; note = Nucleotide with phosphorothioate linkage
  modified_base 10: mod_base = OTHER; note = Nucleotide with phosphorothioate linkage
  modified_base 11: mod_base = OTHER; note = Nucleotide with phosphorothioate linkage
  modified_base 12: mod_base = OTHER; note = Nucleotide with phosphorothioate linkage
  modified_base 13: mod_base = OTHER; note = Nucleotide with phosphorothioate linkage
  modified_base 14: mod_base = OTHER; note = Nucleotide with phosphorothioate linkage
  modified_base 15: mod_base = OTHER; note = beta-D-oxy locked nucleotide with phosphorothioate linkage
  modified_base 16: mod_base = OTHER; note = beta-D-oxy locked nucleotide with phosphorothioate linkage
cttacctatcatgctt

SEQ ID NO: 446 - DNA, 18 bp, synthetic construct
  source 1..18: mol_type = other DNA
  modified_base 1: mod_base = OTHER; note = beta-D-oxy locked nucleotide with phosphorothioate linkage
  modified_base 2: mod_base = OTHER; note = beta-D-oxy locked nucleotide with phosphorothioate linkage
  modified_base 3: mod_base = OTHER; note = 5-methyl beta-D-oxy locked nucleotide with phosphorothioate linkage
  modified_base 4: mod_base = OTHER; note = beta-D-oxy locked nucleotide with phosphorothioate linkage
  modified_base 5: mod_base = OTHER; note = Nucleotide with phosphorothioate linkage
  modified_base 6: mod_base = OTHER; note = Nucleotide with phosphorothioate linkage
  modified_base 7: mod_base = OTHER; note = Nucleotide with phosphorothioate linkage
  modified_base 8: mod_base = OTHER; note = Nucleotide with phosphorothioate linkage
  modified_base 9: mod_base = OTHER; note = Nucleotide with phosphorothioate linkage
  modified_base 10: mod_base = OTHER; note = Nucleotide with phosphorothioate linkage
  modified_base 11: mod_base = OTHER; note = Nucleotide with phosphorothioate linkage
  modified_base 12: mod_base = OTHER; note = Nucleotide with phosphorothioate linkage
  modified_base 13: mod_base = OTHER; note = Nucleotide with phosphorothioate linkage
  modified_base 14: mod_base = OTHER; note = Nucleotide with phosphorothioate linkage
  modified_base 15: mod_base = OTHER; note = beta-D-oxy locked nucleotide with phosphorothioate linkage
  modified_base 16: mod_base = OTHER; note = beta-D-oxy locked nucleotide with phosphorothioate linkage
  modified_base 17: mod_base = OTHER; note = beta-D-oxy locked nucleotide with phosphorothioate linkage
  modified_base 18: mod_base = OTHER; note = beta-D-oxy locked nucleotide with phosphorothioate linkage
tgctgaaatacaaaaata

SEQ ID NO: 447 - DNA, 16 bp, synthetic construct
  source 1..16: mol_type = other DNA
  modified_base 1: mod_base = OTHER; note = beta-D-oxy locked nucleotide with phosphorothioate linkage
  modified_base 2: mod_base = OTHER; note = beta-D-oxy locked nucleotide with phosphorothioate linkage
  modified_base 3: mod_base = OTHER; note = beta-D-oxy locked nucleotide with phosphorothioate linkage
  modified_base 4: mod_base = OTHER; note = 5-methyl beta-D-oxy locked nucleotide with phosphorothioate linkage
  modified_base 5: mod_base = OTHER; note = Nucleotide with phosphorothioate linkage
  modified_base 6: mod_base = OTHER; note = Nucleotide with phosphorothioate linkage
  modified_base 7: mod_base = OTHER; note = Nucleotide with phosphorothioate linkage
  modified_base 8: mod_base = OTHER; note = Nucleotide with phosphorothioate linkage
  modified_base 9: mod_base = OTHER; note = Nucleotide with phosphorothioate linkage
  modified_base 10: mod_base = OTHER; note = Nucleotide with phosphorothioate linkage
  modified_base 11: mod_base = OTHER; note = Nucleotide with phosphorothioate linkage
  modified_base 12: mod_base = OTHER; note = Nucleotide with phosphorothioate linkage
  modified_base 13: mod_base = OTHER; note = beta-D-oxy locked nucleotide with phosphorothioate linkage
  modified_base 14: mod_base = OTHER; note = beta-D-oxy locked nucleotide with phosphorothioate linkage
  modified_base 15: mod_base = OTHER; note = 5-methyl beta-D-oxy locked nucleotide with phosphorothioate linkage
  modified_base 16: mod_base = OTHER; note = beta-D-oxy locked nucleotide with phosphorothioate linkage
gatcactgtaattaca

SEQ ID NO: 448 - DNA, 16 bp, synthetic construct
  source 1..16: mol_type = other DNA
  modified_base 1: mod_base = OTHER; note = 5-methyl beta-D-oxy locked nucleotide with phosphorothioate linkage
  modified_base 2: mod_base = OTHER; note = beta-D-oxy locked nucleotide with phosphorothioate linkage
  modified_base 3: mod_base = OTHER; note = Nucleotide with phosphorothioate linkage
  modified_base 4: mod_base = OTHER; note = Nucleotide with phosphorothioate linkage
  modified_base 5: mod_base = OTHER; note = Nucleotide with phosphorothioate linkage
  modified_base 6: mod_base = OTHER; note = Nucleotide with phosphorothioate linkage
  modified_base 7: mod_base = OTHER; note = Nucleotide with phosphorothioate linkage
  modified_base 8: mod_base = OTHER; note = Nucleotide with phosphorothioate linkage
  modified_base 9: mod_base = OTHER; note = Nucleotide with phosphorothioate linkage
  modified_base 10: mod_base = OTHER; note = Nucleotide with phosphorothioate linkage
  modified_base 11: mod_base = OTHER; note = Nucleotide with phosphorothioate linkage
  modified_base 12: mod_base = OTHER; note = Nucleotide with phosphorothioate linkage
  modified_base 13: mod_base = OTHER; note = Nucleotide with phosphorothioate linkage
  modified_base 14: mod_base = OTHER; note = Nucleotide with phosphorothioate linkage
  modified_base 15: mod_base = OTHER; note = 5-methyl beta-D-oxy locked nucleotide with phosphorothioate linkage
  modified_base 16: mod_base = OTHER; note = 5-methyl beta-D-oxy locked nucleotide with phosphorothioate linkage
cagggaacccattacc

SEQ ID NO: 449 - DNA, 15 bp, synthetic construct
  source 1..15: mol_type = other DNA
  modified_base 1: mod_base = OTHER; note = 5-methyl beta-D-oxy locked nucleotide with phosphorothioate linkage
  modified_base 2: mod_base = OTHER; note = beta-D-oxy locked nucleotide with phosphorothioate linkage
  modified_base 3: mod_base = OTHER; note = Nucleotide with phosphorothioate linkage
  modified_base 4: mod_base = OTHER; note = Nucleotide with phosphorothioate linkage
  modified_base 5: mod_base = OTHER; note = Nucleotide with phosphorothioate linkage
  modified_base 6: mod_base = OTHER; note = Nucleotide with phosphorothioate linkage
  modified_base 7: mod_base = OTHER; note = Nucleotide with phosphorothioate linkage
  modified_base 8: mod_base = OTHER; note = Nucleotide with phosphorothioate linkage
  modified_base 9: mod_base = OTHER; note = Nucleotide with phosphorothioate linkage
  modified_base 10: mod_base = OTHER; note = Nucleotide with phosphorothioate linkage
  modified_base 11: mod_base = OTHER; note = Nucleotide with phosphorothioate linkage
  modified_base 12: mod_base = OTHER; note = Nucleotide with phosphorothioate linkage
  modified_base 13: mod_base = OTHER; note = Nucleotide with phosphorothioate linkage
  modified_base 14: mod_base = OTHER; note = 5-methyl beta-D-oxy locked nucleotide with phosphorothioate linkage
  modified_base 15: mod_base = OTHER; note = 5-methyl beta-D-oxy locked nucleotide with phosphorothioate linkage
cgaagcttccaaccc

SEQ ID NO: 450 - DNA, 16 bp, synthetic construct
  source 1..16: mol_type = other DNA
  modified_base 1: mod_base = OTHER; note = beta-D-oxy locked nucleotide with phosphorothioate linkage
  modified_base 2: mod_base = OTHER; note = beta-D-oxy locked nucleotide with phosphorothioate linkage
  modified_base 3: mod_base = OTHER; note = Nucleotide with phosphorothioate linkage
  modified_base 4: mod_base = OTHER; note = Nucleotide with phosphorothioate linkage
  modified_base 5: mod_base = OTHER; note = Nucleotide with phosphorothioate linkage
  modified_base 6: mod_base = OTHER; note = Nucleotide with phosphorothioate linkage
  modified_base 7: mod_base = OTHER; note = Nucleotide with phosphorothioate linkage
  modified_base 8: mod_base = OTHER; note = Nucleotide with phosphorothioate linkage
  modified_base 9: mod_base = OTHER; note = Nucleotide with phosphorothioate linkage
  modified_base 10: mod_base = OTHER; note = Nucleotide with phosphorothioate linkage
  modified_base 11: mod_base = OTHER; note = Nucleotide with phosphorothioate linkage
  modified_base 12: mod_base = OTHER; note = Nucleotide with phosphorothioate linkage
  modified_base 13: mod_base = OTHER; note = Nucleotide with phosphorothioate linkage
  modified_base 14: mod_base = OTHER; note = 5-methyl beta-D-oxy locked nucleotide with phosphorothioate linkage
  modified_base 15: mod_base = OTHER; note = beta-D-oxy locked nucleotide with phosphorothioate linkage
  modified_base 16: mod_base = OTHER; note = beta-D-oxy locked nucleotide with phosphorothioate linkage
tactcacgatctccat

SEQ ID NO: 451 - DNA, 17 bp, synthetic construct
  source 1..17: mol_type = other DNA
  modified_base 1: mod_base = OTHER; note = 5-methyl beta-D-oxy locked nucleotide with phosphorothioate linkage
  modified_base 2: mod_base = OTHER; note = beta-D-oxy locked nucleotide with phosphorothioate linkage
  modified_base 3: mod_base = OTHER; note = beta-D-oxy locked nucleotide with phosphorothioate linkage
  modified_base 4: mod_base = OTHER; note = 5-methyl beta-D-oxy locked nucleotide with phosphorothioate linkage
  modified_base 5: mod_base = OTHER; note = Nucleotide with phosphorothioate linkage
  modified_base 6: mod_base = OTHER; note = Nucleotide with phosphorothioate linkage
  modified_base 7: mod_base = OTHER; note = Nucleotide with phosphorothioate linkage
  modified_base 8: mod_base = OTHER; note = Nucleotide with phosphorothioate linkage
  modified_base 9: mod_base = OTHER; note = Nucleotide with phosphorothioate linkage
  modified_base 10: mod_base = OTHER; note = Nucleotide with phosphorothioate linkage
  modified_base 11: mod_base = OTHER; note = Nucleotide with phosphorothioate linkage
  modified_base 12: mod_base = OTHER; note = Nucleotide with phosphorothioate linkage
  modified_base 13: mod_base = OTHER; note = Nucleotide with phosphorothioate linkage
  modified_base 14: mod_base = OTHER; note = beta-D-oxy locked nucleotide with phosphorothioate linkage
  modified_base 15: mod_base = OTHER; note = beta-D-oxy locked nucleotide with phosphorothioate linkage
  modified_base 16: mod_base = OTHER; note = beta-D-oxy locked nucleotide with phosphorothioate linkage
  modified_base 17: mod_base = OTHER; note = beta-D-oxy locked nucleotide with phosphorothioate linkage
ctacatgtccaaataat

SEQ ID NO: 452 - DNA, 17 bp, synthetic construct
  source 1..17: mol_type = other DNA
  modified_base 1: mod_base = OTHER; note = beta-D-oxy locked nucleotide with phosphorothioate linkage
  modified_base 2: mod_base = OTHER; note = beta-D-oxy locked nucleotide with phosphorothioate linkage
  modified_base 3: mod_base = OTHER; note = 5-methyl beta-D-oxy locked nucleotide with phosphorothioate linkage
  modified_base 4: mod_base = OTHER; note = Nucleotide with phosphorothioate linkage
  modified_base 5: mod_base = OTHER; note = Nucleotide with phosphorothioate linkage
  modified_base 6: mod_base = OTHER; note = Nucleotide with phosphorothioate linkage
  modified_base 7: mod_base = OTHER; note = Nucleotide with phosphorothioate linkage
  modified_base 8: mod_base = OTHER; note = Nucleotide with phosphorothioate linkage
  modified_base 9: mod_base = OTHER; note = Nucleotide with phosphorothioate linkage
  modified_base 10: mod_base = OTHER; note = Nucleotide with phosphorothioate linkage
  modified_base 11: mod_base = OTHER; note = Nucleotide with phosphorothioate linkage
  modified_base 12: mod_base = OTHER; note = Nucleotide with phosphorothioate linkage
  modified_base 13: mod_base = OTHER; note = Nucleotide with phosphorothioate linkage
  modified_base 14: mod_base = OTHER; note = Nucleotide with phosphorothioate linkage
  modified_base 15: mod_base = OTHER; note = Nucleotide with phosphorothioate linkage
  modified_base 16: mod_base = OTHER; note = beta-D-oxy locked nucleotide with phosphorothioate linkage
  modified_base 17: mod_base = OTHER; note = beta-D-oxy locked nucleotide with phosphorothioate linkage
gtctaacattccaactt

SEQ ID NO: 453 - DNA, 18 bp, synthetic construct
  source 1..18: mol_type = other DNA
  modified_base 1: mod_base = OTHER; note = beta-D-oxy locked nucleotide with phosphorothioate linkage
  modified_base 2: mod_base = OTHER; note = beta-D-oxy locked nucleotide with phosphorothioate linkage
  modified_base 3: mod_base = OTHER; note = beta-D-oxy locked nucleotide with phosphorothioate linkage
  modified_base 4: mod_base = OTHER; note = 5-methyl beta-D-oxy locked nucleotide with phosphorothioate linkage
  modified_base 5: mod_base = OTHER; note = Nucleotide with phosphorothioate linkage
  modified_base 6: mod_base = OTHER; note = Nucleotide with phosphorothioate linkage
  modified_base 7: mod_base = OTHER; note = Nucleotide with phosphorothioate linkage
  modified_base 8: mod_base = OTHER; note = Nucleotide with phosphorothioate linkage
  modified_base 9: mod_base = OTHER; note = Nucleotide with phosphorothioate linkage
  modified_base 10: mod_base = OTHER; note = Nucleotide with phosphorothioate linkage
  modified_base 11: mod_base = OTHER; note = Nucleotide with phosphorothioate linkage
  modified_base 12: mod_base = OTHER; note = Nucleotide with phosphorothioate linkage
  modified_base 13: mod_base = OTHER; note = Nucleotide with phosphorothioate linkage
  modified_base 14: mod_base = OTHER; note = Nucleotide with phosphorothioate linkage
  modified_base 15: mod_base = OTHER; note = Nucleotide with phosphorothioate linkage
  modified_base 16: mod_base = OTHER; note = Nucleotide with phosphorothioate linkage
  modified_base 17: mod_base = OTHER; note = beta-D-oxy locked nucleotide with phosphorothioate linkage
  modified_base 18: mod_base = OTHER; note = beta-D-oxy locked nucleotide with phosphorothioate linkage
tgtctaacattccaactt

SEQ ID NO: 454 - DNA, 17 bp, synthetic construct
  source 1..17: mol_type = other DNA
  modified_base 1: mod_base = OTHER; note = 5-methyl beta-D-oxy locked nucleotide with phosphorothioate linkage
  modified_base 2: mod_base = OTHER; note = beta-D-oxy locked nucleotide with phosphorothioate linkage
  modified_base 3: mod_base = OTHER; note = Nucleotide with phosphorothioate linkage
  modified_base 4: mod_base = OTHER; note = Nucleotide with phosphorothioate linkage
  modified_base 5: mod_base = OTHER; note = Nucleotide with phosphorothioate linkage
  modified_base 6: mod_base = OTHER; note = Nucleotide with phosphorothioate linkage
  modified_base 7: mod_base = OTHER; note = Nucleotide with phosphorothioate linkage
  modified_base 8: mod_base = OTHER; note = Nucleotide with phosphorothioate linkage
  modified_base 9: mod_base = OTHER; note = Nucleotide with phosphorothioate linkage
  modified_base 10: mod_base = OTHER; note = Nucleotide with phosphorothioate linkage
  modified_base 11: mod_base = OTHER; note = Nucleotide with phosphorothioate linkage
  modified_base 12: mod_base = OTHER; note = Nucleotide with phosphorothioate linkage
  modified_base 13: mod_base = OTHER; note = Nucleotide with phosphorothioate linkage
  modified_base 14: mod_base = OTHER; note = Nucleotide with phosphorothioate linkage
  modified_base 15: mod_base = OTHER; note = Nucleotide with phosphorothioate linkage
  modified_base 16: mod_base = OTHER; note = 5-methyl beta-D-oxy locked nucleotide with phosphorothioate linkage
  modified_base 17: mod_base = OTHER; note = 5-methyl beta-D-oxy locked nucleotide with phosphorothioate linkage
ctaatgtctaacattcc

SEQ ID NO: 455 - DNA, 16 bp, synthetic construct
  source 1..16: mol_type = other DNA
  modified_base 1: mod_base = OTHER; note = beta-D-oxy locked nucleotide with phosphorothioate linkage
  modified_base 2: mod_base = OTHER; note = beta-D-oxy locked nucleotide with phosphorothioate linkage
  modified_base 3: mod_base = OTHER; note = beta-D-oxy locked nucleotide with phosphorothioate linkage
  modified_base 4: mod_base = OTHER; note = beta-D-oxy locked nucleotide with phosphorothioate linkage
  modified_base 5: mod_base = OTHER; note = Nucleotide with phosphorothioate linkage
  modified_base 6: mod_base = OTHER; note = Nucleotide with phosphorothioate linkage
  modified_base 7: mod_base = OTHER; note = Nucleotide with phosphorothioate linkage
  modified_base 8: mod_base = OTHER; note = Nucleotide with phosphorothioate linkage
  modified_base 9: mod_base = OTHER; note = Nucleotide with phosphorothioate linkage
  modified_base 10: mod_base = OTHER; note = Nucleotide with phosphorothioate linkage
  modified_base 11: mod_base = OTHER; note = Nucleotide with phosphorothioate linkage
  modified_base 12: mod_base = OTHER; note = Nucleotide with phosphorothioate linkage
  modified_base 13: mod_base = OTHER; note = beta-D-oxy locked nucleotide with phosphorothioate linkage
  modified_base 14: mod_base = OTHER; note = beta-D-oxy locked nucleotide with phosphorothioate linkage
  modified_base 15: mod_base = OTHER; note = 5-methyl beta-D-oxy locked nucleotide with phosphorothioate linkage
  modified_base 16: mod_base = OTHER; note = 5-methyl beta-D-oxy locked nucleotide with phosphorothioate linkage
taatgtctaacattcc

SEQ ID NO: 456 - DNA, 16 bp, synthetic construct
  source 1..16: mol_type = other DNA
  modified_base 1: mod_base = OTHER; note = 5-methyl beta-D-oxy locked nucleotide with phosphorothioate linkage
  modified_base 2: mod_base = OTHER; note = 5-methyl beta-D-oxy locked nucleotide with phosphorothioate linkage
  modified_base 3: mod_base = OTHER; note = beta-D-oxy locked nucleotide with phosphorothioate linkage
  modified_base 4: mod_base = OTHER; note = 5-methyl beta-D-oxy locked nucleotide with phosphorothioate linkage
  modified_base 5: mod_base = OTHER; note = Nucleotide with phosphorothioate linkage
  modified_base 6: mod_base = OTHER; note = Nucleotide with phosphorothioate linkage
  modified_base 7: mod_base = OTHER; note = Nucleotide with phosphorothioate linkage
  modified_base 8: mod_base = OTHER; note = Nucleotide with phosphorothioate linkage
  modified_base 9: mod_base = OTHER; note = Nucleotide with phosphorothioate linkage
  modified_base 10: mod_base = OTHER; note = Nucleotide with phosphorothioate linkage
  modified_base 11: mod_base = OTHER; note = Nucleotide with phosphorothioate linkage
  modified_base 12: mod_base = OTHER; note = Nucleotide with phosphorothioate linkage
  modified_base 13: mod_base = OTHER; note = Nucleotide with phosphorothioate linkage
  modified_base 14: mod_base = OTHER; note = beta-D-oxy locked nucleotide with phosphorothioate linkage
  modified_base 15: mod_base = OTHER; note = beta-D-oxy locked nucleotide with phosphorothioate linkage
  modified_base 16: mod_base = OTHER; note = beta-D-oxy locked nucleotide with phosphorothioate linkage
ccacaaacgttccaaa

SEQ ID NO: 457 - DNA, 16 bp, synthetic construct
  source 1..16: mol_type = other DNA
  modified_base 1: mod_base = OTHER; note = 5-methyl beta-D-oxy locked nucleotide with phosphorothioate linkage
  modified_base 2: mod_base = OTHER; note = 5-methyl beta-D-oxy locked nucleotide with phosphorothioate linkage
  modified_base 3: mod_base = OTHER; note = 5-methyl beta-D-oxy locked nucleotide with phosphorothioate linkage
  modified_base 4: mod_base = OTHER; note = Nucleotide with phosphorothioate linkage
  modified_base 5: mod_base = OTHER; note = Nucleotide with phosphorothioate linkage
  modified_base 6: mod_base = OTHER; note = Nucleotide with phosphorothioate linkage
  modified_base 7: mod_base = OTHER; note = Nucleotide with phosphorothioate linkage
  modified_base 8: mod_base = OTHER; note = Nucleotide with phosphorothioate linkage
  modified_base 9: mod_base = OTHER; note = Nucleotide with phosphorothioate linkage
  modified_base 10: mod_base = OTHER; note = Nucleotide with phosphorothioate linkage
  modified_base 11: mod_base = OTHER; note = Nucleotide with phosphorothioate linkage
  modified_base 12: mod_base = OTHER; note = Nucleotide with phosphorothioate linkage
  modified_base 13: mod_base = OTHER; note = Nucleotide with phosphorothioate linkage
  modified_base 14: mod_base = OTHER; note = Nucleotide with phosphorothioate linkage
  modified_base 15: mod_base = OTHER; note = beta-D-oxy locked nucleotide with phosphorothioate linkage
  modified_base 16: mod_base = OTHER; note = beta-D-oxy locked nucleotide with phosphorothioate linkage
cccacaaacgttccaa

SEQ ID NO: 458 - DNA, 16 bp, synthetic construct
  source 1..16: mol_type = other DNA
  modified_base 1: mod_base = OTHER; note = 5-methyl beta-D-oxy locked nucleotide with phosphorothioate linkage
  modified_base 2: mod_base = OTHER; note = beta-D-oxy locked nucleotide with phosphorothioate linkage
  modified_base 3: mod_base = OTHER; note = Nucleotide with phosphorothioate linkage
  modified_base 4: mod_base = OTHER; note = Nucleotide with phosphorothioate linkage
  modified_base 5: mod_base = OTHER; note = Nucleotide with phosphorothioate linkage
  modified_base 6: mod_base = OTHER; note = Nucleotide with phosphorothioate linkage
  modified_base 7: mod_base = OTHER; note = Nucleotide with phosphorothioate linkage
  modified_base 8: mod_base = OTHER; note = Nucleotide with phosphorothioate linkage
  modified_base 9: mod_base = OTHER; note = Nucleotide with phosphorothioate linkage
  modified_base 10: mod_base = OTHER; note = Nucleotide with phosphorothioate linkage
  modified_base 11: mod_base = OTHER; note = Nucleotide with phosphorothioate linkage
  modified_base 12: mod_base = OTHER; note = Nucleotide with phosphorothioate linkage
  modified_base 13: mod_base = OTHER; note = Nucleotide with phosphorothioate linkage
  modified_base 14: mod_base = OTHER; note = Nucleotide with phosphorothioate linkage
  modified_base 15: mod_base = OTHER; note = 5-methyl beta-D-oxy locked nucleotide with phosphorothioate linkage
  modified_base 16: mod_base = OTHER; note = beta-D-oxy locked nucleotide with phosphorothioate linkage
ctagcacactatccct

SEQ ID NO: 459 - DNA, 18 bp, synthetic construct
  source 1..18: mol_type = other DNA
  modified_base 1: mod_base = OTHER; note = beta-D-oxy locked nucleotide with phosphorothioate linkage
  modified_base 2: mod_base = OTHER; note = 5-methyl beta-D-oxy locked nucleotide with phosphorothioate linkage
  modified_base 3: mod_base = OTHER; note = beta-D-oxy locked nucleotide with phosphorothioate linkage
  modified_base 4: mod_base = OTHER; note = beta-D-oxy locked nucleotide with phosphorothioate linkage
  modified_base 5: mod_base = OTHER; note = Nucleotide with phosphorothioate linkage
  modified_base 6: mod_base = OTHER; note = Nucleotide with phosphorothioate linkage
  modified_base 7: mod_base = OTHER; note = Nucleotide with phosphorothioate linkage
  modified_base 8: mod_base = OTHER; note = Nucleotide with phosphorothioate linkage
  modified_base 9: mod_base = OTHER; note = Nucleotide with phosphorothioate linkage
  modified_base 10: mod_base = OTHER; note = Nucleotide with phosphorothioate linkage
  modified_base 11: mod_base = OTHER; note = Nucleotide with phosphorothioate linkage
  modified_base 12: mod_base = OTHER; note = Nucleotide with phosphorothioate linkage
  modified_base 13: mod_base = OTHER; note = Nucleotide with phosphorothioate linkage
  modified_base 14: mod_base = OTHER; note = Nucleotide with phosphorothioate linkage
  modified_base 15: mod_base = OTHER; note = Nucleotide with phosphorothioate linkage
  modified_base 16: mod_base = OTHER; note = beta-D-oxy locked nucleotide with phosphorothioate linkage
  modified_base 17: mod_base = OTHER; note = 5-methyl beta-D-oxy locked nucleotide with phosphorothioate linkage
  modified_base 18: mod_base = OTHER; note = beta-D-oxy locked nucleotide with phosphorothioate linkage
gctataaatacaaactca

SEQ ID NO: 460 - DNA, 18 bp, synthetic construct
  source 1..18: mol_type = other DNA
  modified_base 1: mod_base = OTHER; note = beta-D-oxy locked nucleotide with phosphorothioate linkage
  modified_base 2: mod_base = OTHER; note = beta-D-oxy locked nucleotide with phosphorothioate linkage
  modified_base 3: mod_base = OTHER; note = 5-methyl beta-D-oxy locked nucleotide with phosphorothioate linkage
  modified_base 4: mod_base = OTHER; note = beta-D-oxy locked nucleotide with phosphorothioate linkage
  modified_base 5: mod_base = OTHER; note = Nucleotide with phosphorothioate linkage
  modified_base 6: mod_base = OTHER; note = Nucleotide with phosphorothioate linkage
  modified_base 7: mod_base = OTHER; note = Nucleotide with phosphorothioate linkage
  modified_base 8: mod_base = OTHER; note = Nucleotide with phosphorothioate linkage
  modified_base 9: mod_base = OTHER; note = Nucleotide with phosphorothioate linkage
  modified_base 10: mod_base = OTHER; note = Nucleotide with phosphorothioate linkage
  modified_base 11: mod_base = OTHER; note = Nucleotide with phosphorothioate linkage
  modified_base 12: mod_base = OTHER; note = Nucleotide with phosphorothioate linkage
  modified_base 13: mod_base = OTHER; note = Nucleotide with phosphorothioate linkage
  modified_base 14: mod_base = OTHER; note = Nucleotide with phosphorothioate linkage
  modified_base 15: mod_base = OTHER; note = Nucleotide with phosphorothioate linkage
  modified_base 16: mod_base = OTHER; note = Nucleotide with phosphorothioate linkage
  modified_base 17: mod_base = OTHER; note = beta-D-oxy locked nucleotide with phosphorothioate linkage
  modified_base 18: mod_base = OTHER; note = 5-methyl beta-D-oxy locked nucleotide with phosphorothioate linkage
tgctataaatacaaactc

SEQ ID NO: 461 - DNA, 18 bp, synthetic construct
  source 1..18: mol_type = other DNA
  modified_base 1: mod_base = OTHER; note = beta-D-oxy locked nucleotide with phosphorothioate linkage
  modified_base 2: mod_base = OTHER; note = beta-D-oxy locked nucleotide with phosphorothioate linkage
  modified_base 3: mod_base = OTHER; note = beta-D-oxy locked nucleotide with phosphorothioate linkage
  modified_base 4: mod_base = OTHER; note = 5-methyl beta-D-oxy locked nucleotide with phosphorothioate linkage
  modified_base 5: mod_base = OTHER; note = Nucleotide with phosphorothioate linkage
  modified_base 6: mod_base = OTHER; note = Nucleotide with phosphorothioate linkage
  modified_base 7: mod_base = OTHER; note = Nucleotide with phosphorothioate linkage
  modified_base 8: mod_base = OTHER; note = Nucleotide with phosphorothioate linkage
  modified_base 9: mod_base = OTHER; note = Nucleotide with phosphorothioate linkage
  modified_base 10: mod_base = OTHER; note = Nucleotide with phosphorothioate linkage
  modified_base 11: mod_base = OTHER; note = Nucleotide with phosphorothioate linkage
  modified_base 12: mod_base = OTHER; note = Nucleotide with phosphorothioate linkage
  modified_base 13: mod_base = OTHER; note = Nucleotide with phosphorothioate linkage
  modified_base 14: mod_base = OTHER; note = Nucleotide with phosphorothioate linkage
  modified_base 15: mod_base = OTHER; note = beta-D-oxy locked nucleotide with phosphorothioate linkage
  modified_base 16: mod_base = OTHER; note = beta-D-oxy locked nucleotide with phosphorothioate linkage
  modified_base 17: mod_base = OTHER; note = 5-methyl beta-D-oxy locked nucleotide with phosphorothioate linkage
  modified_base 18: mod_base = OTHER; note = beta-D-oxy locked nucleotide with phosphorothioate linkage
ttgctataaatacaaact

SEQ ID NO: 462 - DNA, 16 bp, synthetic construct
  source 1..16: mol_type = other DNA
  modified_base 1: mod_base = OTHER; note = beta-D-oxy locked nucleotide with phosphorothioate linkage
  modified_base 2: mod_base = OTHER; note = beta-D-oxy locked nucleotide with phosphorothioate linkage
  modified_base 3: mod_base = OTHER; note = beta-D-oxy locked nucleotide with phosphorothioate linkage
  modified_base 4: mod_base = OTHER; note = beta-D-oxy locked nucleotide with phosphorothioate linkage
  modified_base 5: mod_base = OTHER; note = Nucleotide with phosphorothioate linkage
  modified_base 6: mod_base = OTHER; note = Nucleotide with phosphorothioate linkage
  modified_base 7: mod_base = OTHER; note = Nucleotide with phosphorothioate linkage
  modified_base 8: mod_base = OTHER; note = Nucleotide with phosphorothioate linkage
  modified_base 9: mod_base = OTHER; note = Nucleotide with phosphorothioate linkage
  modified_base 10: mod_base = OTHER; note = Nucleotide with phosphorothioate linkage
  modified_base 11: mod_base = OTHER; note = Nucleotide with phosphorothioate linkage
  modified_base 12: mod_base = OTHER; note = Nucleotide with phosphorothioate linkage
  modified_base 13: mod_base = OTHER; note = beta-D-oxy locked nucleotide with phosphorothioate linkage
  modified_base 14: mod_base = OTHER; note = beta-D-oxy locked nucleotide with phosphorothioate linkage
  modified_base 15: mod_base = OTHER; note = 5-methyl beta-D-oxy locked nucleotide with phosphorothioate linkage
  modified_base 16: mod_base = OTHER; note = beta-D-oxy locked nucleotide with phosphorothioate linkage
gagttacaaacatact

SEQ ID NO: 463 - DNA, 16 bp, synthetic construct
  source 1..16: mol_type = other DNA
  modified_base 1: mod_base = OTHER; note = 5-methyl beta-D-oxy locked nucleotide with phosphorothioate linkage
  modified_base 2: mod_base = OTHER; note = beta-D-oxy locked nucleotide with phosphorothioate linkage
  modified_base 3: mod_base = OTHER; note = beta-D-oxy locked nucleotide with phosphorothioate linkage
  modified_base 4: mod_base = OTHER; note = 5-methyl beta-D-oxy locked nucleotide with phosphorothioate linkage
  modified_base 5: mod_base = OTHER; note = Nucleotide with phosphorothioate linkage
  modified_base 6: mod_base = OTHER; note = Nucleotide with phosphorothioate linkage
  modified_base 7: mod_base = OTHER; note = Nucleotide with phosphorothioate linkage
  modified_base 8: mod_base = OTHER; note = Nucleotide with phosphorothioate linkage
  modified_base 9: mod_base = OTHER; note = Nucleotide with phosphorothioate linkage
  modified_base 10: mod_base = OTHER; note = Nucleotide with phosphorothioate linkage
  modified_base 11: mod_base = OTHER; note = Nucleotide with phosphorothioate linkage
  modified_base 12: mod_base = OTHER; note = Nucleotide with phosphorothioate linkage
  modified_base 13: mod_base = OTHER; note = Nucleotide with phosphorothioate linkage
  modified_base 14: mod_base = OTHER; note = Nucleotide with phosphorothioate linkage
  modified_base 15: mod_base = OTHER; note = beta-D-oxy locked nucleotide with phosphorothioate linkage
  modified_base 16: mod_base = OTHER; note = beta-D-oxy locked nucleotide with phosphorothioate linkage
catcactccaagacat

SEQ ID NO: 464 - DNA, 17 bp, synthetic construct
  source 1..17: mol_type = other DNA
  modified_base 1: mod_base = OTHER; note = beta-D-oxy locked nucleotide with phosphorothioate linkage
  modified_base 2: mod_base = OTHER; note = beta-D-oxy locked nucleotide with phosphorothioate linkage
  modified_base 3: mod_base = OTHER; note = beta-D-oxy locked nucleotide with phosphorothioate linkage
  modified_base 4: mod_base = OTHER; note = Nucleotide with phosphorothioate linkage
  modified_base 5: mod_base = OTHER; note = Nucleotide with phosphorothioate linkage
  modified_base 6: mod_base = OTHER; note = Nucleotide with phosphorothioate linkage
  modified_base 7: mod_base = OTHER; note = Nucleotide with phosphorothioate linkage
  modified_base 8: mod_base = OTHER; note = Nucleotide with phosphorothioate linkage
  modified_base 9: mod_base = OTHER; note = Nucleotide with phosphorothioate linkage
  modified_base 10: mod_base = OTHER; note = Nucleotide with phosphorothioate linkage
  modified_base 11: mod_base = OTHER; note = Nucleotide with phosphorothioate linkage
  modified_base 12: mod_base = OTHER; note = Nucleotide with phosphorothioate linkage
  modified_base 13: mod_base = OTHER; note = Nucleotide with phosphorothioate linkage
  modified_base 14: mod_base = OTHER; note = Nucleotide with phosphorothioate linkage
  modified_base 15: mod_base = OTHER; note = Nucleotide with phosphorothioate linkage
  modified_base 16: mod_base = OTHER; note = 5-methyl beta-D-oxy locked nucleotide with phosphorothioate linkage
  modified_base 17: mod_base = OTHER; note = beta-D-oxy locked nucleotide with phosphorothioate linkage
gatatctcactatacct

SEQ ID NO: 465 - DNA, 16 bp, synthetic construct
  source 1..16: mol_type = other DNA
  modified_base 1: mod_base = OTHER; note = beta-D-oxy locked nucleotide with phosphorothioate linkage
  modified_base 2: mod_base = OTHER; note = beta-D-oxy locked nucleotide with phosphorothioate linkage
  modified_base 3: mod_base = OTHER; note = Nucleotide with phosphorothioate linkage
  modified_base 4: mod_base = OTHER; note = Nucleotide with phosphorothioate linkage
  modified_base 5: mod_base = OTHER; note = Nucleotide with phosphorothioate linkage
  modified_base 6: mod_base = OTHER; note = Nucleotide with phosphorothioate linkage
  modified_base 7: mod_base = OTHER; note = Nucleotide with phosphorothioate linkage
  modified_base 8: mod_base = OTHER; note = Nucleotide with phosphorothioate linkage
  modified_base 9: mod_base = OTHER; note = Nucleotide with phosphorothioate linkage
  modified_base 10: mod_base = OTHER; note = Nucleotide with phosphorothioate linkage
  modified_base 11: mod_base = OTHER; note = Nucleotide with phosphorothioate linkage
  modified_base 12: mod_base = OTHER; note = Nucleotide with phosphorothioate linkage
  modified_base 13: mod_base = OTHER; note = Nucleotide with phosphorothioate linkage
  modified_base 14: mod_base = OTHER; note = Nucleotide with phosphorothioate linkage
  modified_base 15: mod_base = OTHER; note = 5-methyl beta-D-oxy locked nucleotide with phosphorothioate linkage
  modified_base 16: mod_base = OTHER; note = beta-D-oxy locked nucleotide with phosphorothioate linkage
agtgtaccaacccaca

SEQ ID NO: 466 - DNA, 17 bp, synthetic construct
  source 1..17: mol_type = other DNA
  modified_base 1: mod_base = OTHER; note = beta-D-oxy locked nucleotide with phosphorothioate linkage
  modified_base 2: mod_base = OTHER; note = beta-D-oxy locked nucleotide with phosphorothioate linkage
  modified_base 3: mod_base = OTHER; note = Nucleotide with phosphorothioate linkage
  modified_base 4: mod_base = OTHER; note = Nucleotide with phosphorothioate linkage
  modified_base 5: mod_base = OTHER; note = Nucleotide with phosphorothioate linkage
  modified_base 6: mod_base = OTHER; note = Nucleotide with phosphorothioate linkage
  modified_base 7: mod_base = OTHER; note = Nucleotide with phosphorothioate linkage
  modified_base 8: mod_base = OTHER; note = Nucleotide with phosphorothioate linkage
  modified_base 9: mod_base = OTHER; note = Nucleotide with phosphorothioate linkage
  modified_base 10: mod_base = OTHER; note = Nucleotide with phosphorothioate linkage
  modified_base 11: mod_base = OTHER; note = Nucleotide with phosphorothioate linkage
  modified_base 12: mod_base = OTHER; note = Nucleotide with phosphorothioate linkage
  modified_base 13: mod_base = OTHER; note = Nucleotide with phosphorothioate linkage
  modified_base 14: mod_base = OTHER; note = beta-D-oxy locked nucleotide with phosphorothioate linkage
  modified_base 15: mod_base = OTHER; note = beta-D-oxy locked nucleotide with phosphorothioate linkage
  modified_base 16: mod_base = OTHER; note = beta-D-oxy locked nucleotide with phosphorothioate linkage
  modified_base 17: mod_base = OTHER; note = beta-D-oxy locked nucleotide with phosphorothioate linkage
agacattctcacatttt

SEQ ID NO: 467 - DNA, 18 bp, synthetic construct
  source 1..18: mol_type = other DNA
  modified_base 1: mod_base = OTHER; note = beta-D-oxy locked nucleotide with phosphorothioate linkage
  modified_base 2: mod_base = OTHER; note = 5-methyl beta-D-oxy locked nucleotide with phosphorothioate linkage
  modified_base 3: mod_base = OTHER; note = Nucleotide with phosphorothioate linkage
  modified_base 4: mod_base = OTHER; note = Nucleotide with phosphorothioate linkage
  modified_base 5: mod_base = OTHER; note = Nucleotide with phosphorothioate linkage
  modified_base 6: mod_base = OTHER; note = Nucleotide with phosphorothioate linkage
  modified_base 7: mod_base = OTHER; note = Nucleotide with phosphorothioate linkage
  modified_base 8: mod_base = OTHER; note = Nucleotide with phosphorothioate linkage
  modified_base 9: mod_base = OTHER; note = Nucleotide with phosphorothioate linkage
  modified_base 10: mod_base = OTHER; note = Nucleotide with phosphorothioate linkage
  modified_base 11: mod_base = OTHER; note = Nucleotide with phosphorothioate linkage
  modified_base 12: mod_base = OTHER; note = Nucleotide with phosphorothioate linkage
  modified_base 13: mod_base = OTHER; note = Nucleotide with phosphorothioate linkage
  modified_base 14: mod_base = OTHER; note = Nucleotide with phosphorothioate linkage
  modified_base 15: mod_base = OTHER; note = Nucleotide with phosphorothioate linkage
  modified_base 16: mod_base = OTHER; note = Nucleotide with phosphorothioate linkage
  modified_base 17: mod_base = OTHER; note = beta-D-oxy locked nucleotide with phosphorothioate linkage
  modified_base 18: mod_base = OTHER; note = beta-D-oxy locked nucleotide with phosphorothioate linkage
tcagacattctcacattt

SEQ ID NO: 468 - DNA, 17 bp, synthetic construct
  source 1..17: mol_type = other DNA
  modified_base 1: mod_base = OTHER; note = beta-D-oxy locked nucleotide with phosphorothioate linkage
  modified_base 2: mod_base = OTHER; note = 5-methyl beta-D-oxy locked nucleotide with phosphorothioate linkage
  modified_base 3: mod_base = OTHER; note = beta-D-oxy locked nucleotide with phosphorothioate linkage
  modified_base 4: mod_base = OTHER; note = Nucleotide with phosphorothioate linkage
  modified_base 5: mod_base = OTHER; note = Nucleotide with phosphorothioate linkage
  modified_base 6: mod_base = OTHER; note = Nucleotide with phosphorothioate linkage
  modified_base 7: mod_base = OTHER; note = Nucleotide with phosphorothioate linkage
  modified_base 8: mod_base = OTHER; note = Nucleotide with phosphorothioate linkage
  modified_base 9: mod_base = OTHER; note = Nucleotide with phosphorothioate linkage
  modified_base 10: mod_base = OTHER; note = Nucleotide with phosphorothioate linkage
  modified_base 11: mod_base = OTHER; note = Nucleotide with phosphorothioate linkage
  modified_base 12: mod_base = OTHER; note = Nucleotide with phosphorothioate linkage
  modified_base 13: mod_base = OTHER; note = Nucleotide with phosphorothioate linkage
  modified_base 14: mod_base = OTHER; note = 5-methyl beta-D-oxy locked nucleotide with phosphorothioate linkage
  modified_base 15: mod_base = OTHER; note = beta-D-oxy locked nucleotide with phosphorothioate linkage
  modified_base 16: mod_base = OTHER; note = beta-D-oxy locked nucleotide with phosphorothioate linkage
  modified_base 17: mod_base = OTHER; note = beta-D-oxy locked nucleotide with phosphorothioate linkage
tcagacattctcacatt

SEQ ID NO: 469 - DNA, 16 bp, synthetic construct
  source 1..16: mol_type = other DNA
  modified_base 1: mod_base = OTHER; note = 5-methyl beta-D-oxy locked nucleotide with phosphorothioate linkage
  modified_base 2: mod_base = OTHER; note = 5-methyl beta-D-oxy locked nucleotide with phosphorothioate linkage
  modified_base 3: mod_base = OTHER; note = Nucleotide with phosphorothioate linkage
  modified_base 4: mod_base = OTHER; note = Nucleotide with phosphorothioate linkage
  modified_base 5: mod_base = OTHER; note = Nucleotide with phosphorothioate linkage
  modified_base 6: mod_base = OTHER; note = Nucleotide with phosphorothioate linkage
  modified_base 7: mod_base = OTHER; note = Nucleotide with phosphorothioate linkage
  modified_base 8: mod_base = OTHER; note = Nucleotide with phosphorothioate linkage
  modified_base 9: mod_base = OTHER; note = Nucleotide with phosphorothioate linkage
  modified_base 10: mod_base = OTHER; note = Nucleotide with phosphorothioate linkage
  modified_base 11: mod_base = OTHER; note = Nucleotide with phosphorothioate linkage
  modified_base 12: mod_base = OTHER; note = Nucleotide with phosphorothioate linkage
  modified_base 13: mod_base = OTHER; note = Nucleotide with phosphorothioate linkage
  modified_base 14: mod_base = OTHER; note = Nucleotide with phosphorothioate linkage
  modified_base 15: mod_base = OTHER; note = beta-D-oxy locked nucleotide with phosphorothioate linkage
  modified_base 16: mod_base = OTHER; note = 5-methyl beta-D-oxy locked nucleotide with phosphorothioate linkage
cccaagctagtctatc

SEQ ID NO: 470 - DNA, 17 bp, synthetic construct
  source 1..17: mol_type = other DNA
  modified_base 1: mod_base = OTHER; note = beta-D-oxy locked nucleotide with phosphorothioate linkage
  modified_base 2: mod_base = OTHER; note = beta-D-oxy locked nucleotide with phosphorothioate linkage
  modified_base 3: mod_base = OTHER; note = Nucleotide with phosphorothioate linkage
  modified_base 4: mod_base = OTHER; note = Nucleotide with phosphorothioate linkage
  modified_base 5: mod_base = OTHER; note = Nucleotide with phosphorothioate linkage
  modified_base 6: mod_base = OTHER; note = Nucleotide with phosphorothioate linkage
  modified_base 7: mod_base = OTHER; note = Nucleotide with phosphorothioate linkage
  modified_base 8: mod_base = OTHER; note = Nucleotide with phosphorothioate linkage
  modified_base 9: mod_base = OTHER; note = Nucleotide with phosphorothioate linkage
  modified_base 10: mod_base = OTHER; note = Nucleotide with phosphorothioate linkage
  modified_base 11: mod_base = OTHER; note = Nucleotide with phosphorothioate linkage
  modified_base 12: mod_base = OTHER; note = Nucleotide with phosphorothioate linkage
  modified_base 13: mod_base = OTHER; note = Nucleotide with phosphorothioate linkage
  modified_base 14: mod_base = OTHER; note = Nucleotide with phosphorothioate linkage
  modified_base 15: mod_base = OTHER; note = Nucleotide with phosphorothioate linkage
  modified_base 16: mod_base = OTHER; note = 5-methyl beta-D-oxy locked nucleotide with phosphorothioate linkage
  modified_base 17: mod_base = OTHER; note = beta-D-oxy locked nucleotide with phosphorothioate linkage
attttgcatcattccca

SEQ ID NO: 471 - DNA, 17 bp, synthetic construct
  source 1..17: mol_type = other DNA
  modified_base 1: mod_base = OTHER; note = beta-D-oxy locked nucleotide with phosphorothioate linkage
  modified_base 2: mod_base = OTHER; note = beta-D-oxy locked nucleotide with phosphorothioate linkage
  modified_base 3: mod_base = OTHER; note = beta-D-oxy locked nucleotide with phosphorothioate linkage
  modified_base 4: mod_base = OTHER; note = beta-D-oxy locked nucleotide with phosphorothioate linkage
  modified_base 5: mod_base = OTHER; note = Nucleotide with phosphorothioate linkage
  modified_base 6: mod_base = OTHER; note = Nucleotide with phosphorothioate linkage
  modified_base 7: mod_base = OTHER; note = Nucleotide with phosphorothioate linkage
  modified_base 8: mod_base = OTHER; note = Nucleotide with phosphorothioate linkage
  modified_base 9: mod_base = OTHER; note = Nucleotide with phosphorothioate linkage
  modified_base 10: mod_base = OTHER; note = Nucleotide with phosphorothioate linkage
  modified_base 11: mod_base = OTHER; note = Nucleotide with phosphorothioate linkage
  modified_base 12: mod_base = OTHER; note = Nucleotide with phosphorothioate linkage
  modified_base 13: mod_base = OTHER; note = Nucleotide with phosphorothioate linkage
  modified_base 14: mod_base = OTHER; note = beta-D-oxy locked nucleotide with phosphorothioate linkage
  modified_base 15: mod_base = OTHER; note = beta-D-oxy locked nucleotide with phosphorothioate linkage
  modified_base 16: mod_base = OTHER; note = beta-D-oxy locked nucleotide with phosphorothioate linkage
  modified_base 17: mod_base = OTHER; note = beta-D-oxy locked nucleotide with phosphorothioate linkage
tgagattttactaaata

SEQ ID NO: 472 - DNA, 21 bp, synthetic construct
  source 1..21: mol_type = other DNA
  modified_base 1: mod_base = OTHER; note = beta-D-oxy locked nucleotide with phosphorothioate linkage
  modified_base 2: mod_base = OTHER; note = 5-methyl beta-D-oxy locked nucleotide with phosphorothioate linkage
  modified_base 3: mod_base = OTHER; note = Nucleotide with phosphorothioate linkage
  modified_base 4: mod_base = OTHER; note = Nucleotide with phosphorothioate linkage
  modified_base 5: mod_base = OTHER; note = Nucleotide with phosphorothioate linkage
  modified_base 6: mod_base = OTHER; note = Nucleotide with phosphorothioate linkage
  modified_base 7: mod_base = OTHER; note = Nucleotide with phosphorothioate linkage
  modified_base 8: mod_base = OTHER; note = Nucleotide with phosphorothioate linkage
  modified_base 9: mod_base = OTHER; note = Nucleotide with phosphorothioate linkage
  modified_base 10: mod_base = OTHER; note = Nucleotide with phosphorothioate linkage
  modified_base 11: mod_base = OTHER; note = Nucleotide with phosphorothioate linkage
  modified_base 12: mod_base = OTHER; note = Nucleotide with phosphorothioate linkage
  modified_base 13: mod_base = OTHER; note = Nucleotide with phosphorothioate linkage
  modified_base 14: mod_base = OTHER; note = Nucleotide with phosphorothioate linkage
  modified_base 15: mod_base = OTHER; note = Nucleotide with phosphorothioate linkage
  modified_base 16: mod_base = OTHER; note = Nucleotide with phosphorothioate linkage
  modified_base 17: mod_base = OTHER; note = Nucleotide with phosphorothioate linkage
  modified_base 18: mod_base = OTHER; note = Nucleotide with phosphorothioate linkage
  modified_base 19: mod_base = OTHER; note = Nucleotide with phosphorothioate linkage
  modified_base 20: mod_base = OTHER; note = 5-methyl beta-D-oxy locked nucleotide with phosphorothioate linkage
  modified_base 21: mod_base = OTHER; note = beta-D-oxy locked nucleotide with phosphorothioate linkage
tcttcaccacatctttaaaca

SEQ ID NO: 473 - DNA, 20 bp, synthetic construct
  source 1..20: mol_type = other DNA
  modified_base 1: mod_base = OTHER; note = beta-D-oxy locked nucleotide with phosphorothioate linkage
  modified_base 2: mod_base = OTHER; note = 5-methyl beta-D-oxy locked nucleotide with phosphorothioate linkage
  modified_base 3: mod_base = OTHER; note = Nucleotide with phosphorothioate linkage
  modified_base 4: mod_base = OTHER; note = Nucleotide with phosphorothioate linkage
  modified_base 5: mod_base = OTHER; note = Nucleotide with phosphorothioate linkage
  modified_base 6: mod_base = OTHER; note = Nucleotide with phosphorothioate linkage
  modified_base 7: mod_base = OTHER; note = Nucleotide with phosphorothioate linkage
  modified_base 8: mod_base = OTHER; note = Nucleotide with phosphorothioate linkage
  modified_base 9: mod_base = OTHER; note = Nucleotide with phosphorothioate linkage
  modified_base 10: mod_base = OTHER; note = Nucleotide with phosphorothioate linkage
  modified_base 11: mod_base = OTHER; note = Nucleotide with phosphorothioate linkage
  modified_base 12: mod_base = OTHER; note = Nucleotide with phosphorothioate linkage
  modified_base 13: mod_base = OTHER; note = Nucleotide with phosphorothioate linkage
  modified_base 14: mod_base = OTHER; note = Nucleotide with phosphorothioate linkage
  modified_base 15: mod_base = OTHER; note = Nucleotide with phosphorothioate linkage
  modified_base 16: mod_base = OTHER; note = Nucleotide with phosphorothioate linkage
  modified_base 17: mod_base = OTHER; note = Nucleotide with phosphorothioate linkage
  modified_base 18: mod_base = OTHER; note = Nucleotide with phosphorothioate linkage
  modified_base 19: mod_base = OTHER; note = beta-D-oxy locked nucleotide with phosphorothioate linkage
  modified_base 20: mod_base = OTHER; note = 5-methyl beta-D-oxy locked nucleotide with phosphorothioate linkage
tcttcaccacatctttaaac

SEQ ID NO: 474 - DNA, 16 bp, synthetic construct
  source 1..16: mol_type = other DNA
  modified_base 1: mod_base = OTHER; note = beta-D-oxy locked nucleotide with phosphorothioate linkage
  modified_base 2: mod_base = OTHER; note = beta-D-oxy locked nucleotide with phosphorothioate linkage
  modified_base 3: mod_base = OTHER; note = beta-D-oxy locked nucleotide with phosphorothioate linkage
  modified_base 4: mod_base = OTHER; note = Nucleotide with phosphorothioate linkage
  modified_base 5: mod_base = OTHER; note = Nucleotide with phosphorothioate linkage
  modified_base 6: mod_base = OTHER; note = Nucleotide with phosphorothioate linkage
  modified_base 7: mod_base = OTHER; note = Nucleotide with phosphorothioate linkage
  modified_base 8: mod_base = OTHER; note = Nucleotide with phosphorothioate linkage
  modified_base 9: mod_base = OTHER; note = Nucleotide with phosphorothioate linkage
  modified_base 10: mod_base = OTHER; note = Nucleotide with phosphorothioate linkage
  modified_base 11: mod_base = OTHER; note = Nucleotide with phosphorothioate linkage
  modified_base 12: mod_base = OTHER; note = Nucleotide with phosphorothioate linkage
  modified_base 13: mod_base = OTHER; note = Nucleotide with phosphorothioate linkage
  modified_base 14: mod_base = OTHER; note = 5-methyl beta-D-oxy locked nucleotide with phosphorothioate linkage
  modified_base 15: mod_base = OTHER; note = beta-D-oxy locked nucleotide with phosphorothioate linkage
  modified_base 16: mod_base = OTHER; note = 5-methyl beta-D-oxy locked nucleotide with phosphorothioate linkage
aggttatcttcaccac

SEQ ID NO: 475 - DNA, 16 bp, synthetic construct
  source 1..16: mol_type = other DNA
  modified_base 1: mod_base = OTHER; note = 5-methyl beta-D-oxy locked nucleotide with phosphorothioate linkage
  modified_base 2: mod_base = OTHER; note = beta-D-oxy locked nucleotide with phosphorothioate linkage
  modified_base 3: mod_base = OTHER; note = beta-D-oxy locked nucleotide with phosphorothioate linkage
  modified_base 4: mod_base = OTHER; note = beta-D-oxy locked nucleotide with phosphorothioate linkage
  modified_base 5: mod_base = OTHER; note = Nucleotide with phosphorothioate linkage
  modified_base 6: mod_base = OTHER; note = Nucleotide with phosphorothioate linkage
  modified_base 7: mod_base = OTHER; note = Nucleotide with phosphorothioate linkage
  modified_base 8: mod_base = OTHER; note = Nucleotide with phosphorothioate linkage
  modified_base 9: mod_base = OTHER; note = Nucleotide with phosphorothioate linkage
  modified_base 10: mod_base = OTHER; note = Nucleotide with phosphorothioate linkage
  modified_base 11: mod_base = OTHER; note = Nucleotide with phosphorothioate linkage
  modified_base 12: mod_base = OTHER; note = Nucleotide with phosphorothioate linkage
  modified_base 13: mod_base = OTHER; note = Nucleotide with phosphorothioate linkage
  modified_base 14: mod_base = OTHER; note = Nucleotide with phosphorothioate linkage
  modified_base 15: mod_base = OTHER; note = 5-methyl beta-D-oxy locked nucleotide with phosphorothioate linkage
  modified_base 16: mod_base = OTHER; note = beta-D-oxy locked nucleotide with phosphorothioate linkage
caaatccgtccacaca

SEQ ID NO: 476 - DNA, 21 bp, synthetic construct
  source 1..21: mol_type = other DNA
  modified_base 1: mod_base = OTHER; note = beta-D-oxy locked nucleotide with phosphorothioate linkage
  modified_base 2: mod_base = OTHER; note = beta-D-oxy locked nucleotide with phosphorothioate linkage
  modified_base 3: mod_base = OTHER; note = Nucleotide with phosphorothioate linkage
  modified_base 4: mod_base = OTHER; note = Nucleotide with phosphorothioate linkage
  modified_base 5: mod_base = OTHER; note = Nucleotide with phosphorothioate linkage
  modified_base 6: mod_base = OTHER; note = Nucleotide with phosphorothioate linkage
  modified_base 7: mod_base = OTHER; note = Nucleotide with phosphorothioate linkage
  modified_base 8: mod_base = OTHER; note = Nucleotide with phosphorothioate linkage
  modified_base 9: mod_base = OTHER; note = Nucleotide with phosphorothioate linkage
  modified_base 10: mod_base = OTHER; note = Nucleotide with phosphorothioate linkage
  modified_base 11: mod_base = OTHER; note = Nucleotide with phosphorothioate linkage
  modified_base 12: mod_base = OTHER; note = Nucleotide with phosphorothioate linkage
  modified_base 13: mod_base = OTHER; note = Nucleotide with phosphorothioate linkage
  modified_base 14: mod_base = OTHER; note = Nucleotide with phosphorothioate linkage
  modified_base 15: mod_base = OTHER; note = Nucleotide with phosphorothioate linkage
  modified_base 16: mod_base = OTHER; note = Nucleotide with phosphorothioate linkage
  modified_base 17: mod_base = OTHER; note = Nucleotide with phosphorothioate linkage
  modified_base 18: mod_base = OTHER; note = Nucleotide with phosphorothioate linkage
  modified_base 19: mod_base = OTHER; note = beta-D-oxy locked nucleotide with phosphorothioate linkage
  modified_base 20: mod_base = OTHER; note = beta-D-oxy locked nucleotide with phosphorothioate linkage
  modified_base 21: mod_base = OTHER; note = beta-D-oxy locked nucleotide with phosphorothioate linkage
tttacctccacaacttcaaat

SEQ ID NO: 477 - DNA, 17 bp, synthetic construct
  source 1..17: mol_type = other DNA
  modified_base 1: mod_base = OTHER; note = beta-D-oxy locked nucleotide with phosphorothioate linkage
  modified_base 2: mod_base = OTHER; note = 5-methyl beta-D-oxy locked nucleotide with phosphorothioate linkage
  modified_base 3: mod_base = OTHER; note = 5-methyl beta-D-oxy locked nucleotide with phosphorothioate linkage
  modified_base 4: mod_base = OTHER; note = Nucleotide with phosphorothioate linkage
  modified_base 5: mod_base = OTHER; note = Nucleotide with phosphorothioate linkage
  modified_base 6: mod_base = OTHER; note = Nucleotide with phosphorothioate linkage
  modified_base 7: mod_base = OTHER; note = Nucleotide with phosphorothioate linkage
  modified_base 8: mod_base = OTHER; note = Nucleotide with phosphorothioate linkage
  modified_base 9: mod_base = OTHER; note = Nucleotide with phosphorothioate linkage
  modified_base 10: mod_base = OTHER; note = Nucleotide with phosphorothioate linkage
  modified_base 11: mod_base = OTHER; note = Nucleotide with phosphorothioate linkage
  modified_base 12: mod_base = OTHER; note = Nucleotide with phosphorothioate linkage
  modified_base 13: mod_base = OTHER; note = Nucleotide with phosphorothioate linkage
  modified_base 14: mod_base = OTHER; note = Nucleotide with phosphorothioate linkage
  modified_base 15: mod_base = OTHER; note = Nucleotide with phosphorothioate linkage
  modified_base 16: mod_base = OTHER; note = beta-D-oxy locked nucleotide with phosphorothioate linkage
  modified_base 17: mod_base = OTHER; note = beta-D-oxy locked nucleotide with phosphorothioate linkage
acctccacaacttcaaa

SEQ ID NO: 478 - DNA, 16 bp, synthetic construct
  source 1..16: mol_type = other DNA
  modified_base 1: mod_base = OTHER; note = beta-D-oxy locked nucleotide with phosphorothioate linkage
  modified_base 2: mod_base = OTHER; note = beta-D-oxy locked nucleotide with phosphorothioate linkage
  modified_base 3: mod_base = OTHER; note = Nucleotide with phosphorothioate linkage
  modified_base 4: mod_base = OTHER; note = Nucleotide with phosphorothioate linkage
  modified_base 5: mod_base = OTHER; note = Nucleotide with phosphorothioate linkage
  modified_base 6: mod_base = OTHER; note = Nucleotide with phosphorothioate linkage
  modified_base 7: mod_base = OTHER; note = Nucleotide with phosphorothioate linkage
  modified_base 8: mod_base = OTHER; note = Nucleotide with phosphorothioate linkage
  modified_base 9: mod_base = OTHER; note = Nucleotide with phosphorothioate linkage
  modified_base 10: mod_base = OTHER; note = Nucleotide with phosphorothioate linkage
  modified_base 11: mod_base = OTHER; note = Nucleotide with phosphorothioate linkage
  modified_base 12: mod_base = OTHER; note = Nucleotide with phosphorothioate linkage
  modified_base 13: mod_base = OTHER; note = Nucleotide with phosphorothioate linkage
  modified_base 14: mod_base = OTHER; note = 5-methyl beta-D-oxy locked nucleotide with phosphorothioate linkage
  modified_base 15: mod_base = OTHER; note = beta-D-oxy locked nucleotide with phosphorothioate linkage
  modified_base 16: mod_base = OTHER; note = 5-methyl beta-D-oxy locked nucleotide with phosphorothioate linkage
ggtactttacctccac

SEQ ID NO: 479 - DNA, 16 bp, synthetic construct
  source 1..16: mol_type = other DNA
  modified_base 1: mod_base = OTHER; note = beta-D-oxy locked nucleotide with phosphorothioate linkage
  modified_base 2: mod_base = OTHER; note = beta-D-oxy locked nucleotide with phosphorothioate linkage
  modified_base 3: mod_base = OTHER; note = Nucleotide with phosphorothioate linkage
  modified_base 4: mod_base = OTHER; note = Nucleotide with phosphorothioate linkage
  modified_base 5: mod_base = OTHER; note = Nucleotide with phosphorothioate linkage
  modified_base 6: mod_base = OTHER; note = Nucleotide with phosphorothioate linkage
  modified_base 7: mod_base = OTHER; note = Nucleotide with phosphorothioate linkage
  modified_base 8: mod_base = OTHER; note = Nucleotide with phosphorothioate linkage
  modified_base 9: mod_base = OTHER; note = Nucleotide with phosphorothioate linkage
  modified_base 10: mod_base = OTHER; note = Nucleotide with phosphorothioate linkage
  modified_base 11: mod_base = OTHER; note = Nucleotide with phosphorothioate linkage
  modified_base 12: mod_base = OTHER; note = Nucleotide with phosphorothioate linkage
  modified_base 13: mod_base = OTHER; note = Nucleotide with phosphorothioate linkage
  modified_base 14: mod_base = OTHER; note = Nucleotide with phosphorothioate linkage
  modified_base 15: mod_base = OTHER; note = 5-methyl beta-D-oxy locked nucleotide with phosphorothioate linkage
  modified_base 16: mod_base = OTHER; note = beta-D-oxy locked nucleotide with phosphorothioate linkage
tggtactttacctcca

SEQ ID NO: 480 - DNA, 16 bp, synthetic construct
  source 1..16: mol_type = other DNA
  modified_base 1: mod_base = OTHER; note = 5-methyl beta-D-oxy locked nucleotide with phosphorothioate linkage
  modified_base 2: mod_base = OTHER; note = 5-methyl beta-D-oxy locked nucleotide with phosphorothioate linkage
  modified_base 3: mod_base = OTHER; note = Nucleotide with phosphorothioate linkage
  modified_base 4: mod_base = OTHER; note = Nucleotide with phosphorothioate linkage
  modified_base 5: mod_base = OTHER; note = Nucleotide with phosphorothioate linkage
  modified_base 6: mod_base = OTHER; note = Nucleotide with phosphorothioate linkage
  modified_base 7: mod_base = OTHER; note = Nucleotide with phosphorothioate linkage
  modified_base 8: mod_base = OTHER; note = Nucleotide with phosphorothioate linkage
  modified_base 9: mod_base = OTHER; note = Nucleotide with phosphorothioate linkage
  modified_base 10: mod_base = OTHER; note = Nucleotide with phosphorothioate linkage
  modified_base 11: mod_base = OTHER; note = Nucleotide with phosphorothioate linkage
  modified_base 12: mod_base = OTHER; note = Nucleotide with phosphorothioate linkage
  modified_base 13: mod_base = OTHER; note = Nucleotide with phosphorothioate linkage
  modified_base 14: mod_base = OTHER; note = beta-D-oxy locked nucleotide with phosphorothioate linkage
  modified_base 15: mod_base = OTHER; note = beta-D-oxy locked nucleotide with phosphorothioate linkage
  modified_base 16: mod_base = OTHER; note = beta-D-oxy locked nucleotide with phosphorothioate linkage
cctcttgtgctacaat

SEQ ID NO: 481 - DNA, 16 bp, synthetic construct
  source 1..16: mol_type = other DNA
  modified_base 1: mod_base = OTHER; note = beta-D-oxy locked nucleotide with phosphorothioate linkage
  modified_base 2: mod_base = OTHER; note = beta-D-oxy locked nucleotide with phosphorothioate linkage
  modified_base 3: mod_base = OTHER; note = Nucleotide with phosphorothioate linkage
  modified_base 4: mod_base = OTHER; note = Nucleotide with phosphorothioate linkage
  modified_base 5: mod_base = OTHER; note = Nucleotide with phosphorothioate linkage
  modified_base 6: mod_base = OTHER; note = Nucleotide with phosphorothioate linkage
  modified_base 7: mod_base = OTHER; note = Nucleotide with phosphorothioate linkage
  modified_base 8: mod_base = OTHER; note = Nucleotide with phosphorothioate linkage
  modified_base 9: mod_base = OTHER; note = Nucleotide with phosphorothioate linkage
  modified_base 10: mod_base = OTHER; note = Nucleotide with phosphorothioate linkage
  modified_base 11: mod_base = OTHER; note = Nucleotide with phosphorothioate linkage
  modified_base 12: mod_base = OTHER; note = Nucleotide with phosphorothioate linkage
  modified_base 13: mod_base = OTHER; note = Nucleotide with phosphorothioate linkage
  modified_base 14: mod_base = OTHER; note = Nucleotide with phosphorothioate linkage
  modified_base 15: mod_base = OTHER; note = 5-methyl beta-D-oxy locked nucleotide with phosphorothioate linkage
  modified_base 16: mod_base = OTHER; note = beta-D-oxy locked nucleotide with phosphorothioate linkage
taacccaatgtaccca

SEQ ID NO: 482 - DNA, 17 bp, synthetic construct
  source 1..17: mol_type = other DNA
  modified_base 1: mod_base = OTHER; note = 5-methyl beta-D-oxy locked nucleotide with phosphorothioate linkage
  modified_base 2: mod_base = OTHER; note = 5-methyl beta-D-oxy locked nucleotide with phosphorothioate linkage
  modified_base 3: mod_base = OTHER; note = beta-D-oxy locked nucleotide with phosphorothioate linkage
  modified_base 4: mod_base = OTHER; note = Nucleotide with phosphorothioate linkage
  modified_base 5: mod_base = OTHER; note = Nucleotide with phosphorothioate linkage
  modified_base 6: mod_base = OTHER; note = Nucleotide with phosphorothioate linkage
  modified_base 7: mod_base = OTHER; note = Nucleotide with phosphorothioate linkage
  modified_base 8: mod_base = OTHER; note = Nucleotide with phosphorothioate linkage
  modified_base 9: mod_base = OTHER; note = Nucleotide with phosphorothioate linkage
  modified_base 10: mod_base = OTHER; note = Nucleotide with phosphorothioate linkage
  modified_base 11: mod_base = OTHER; note = Nucleotide with phosphorothioate linkage
  modified_base 12: mod_base = OTHER; note = Nucleotide with phosphorothioate linkage
  modified_base 13: mod_base = OTHER; note = Nucleotide with phosphorothioate linkage
  modified_base 14: mod_base = OTHER; note = beta-D-oxy locked nucleotide with phosphorothioate linkage
  modified_base 15: mod_base = OTHER; note = beta-D-oxy locked nucleotide with phosphorothioate linkage
  modified_base 16: mod_base = OTHER; note = 5-methyl beta-D-oxy locked nucleotide with phosphorothioate linkage
  modified_base 17: mod_base = OTHER; note = beta-D-oxy locked nucleotide with phosphorothioate linkage
ccttttcaaaagatact

SEQ ID NO: 483 - DNA, 19 bp, synthetic construct
  source 1..19: mol_type = other DNA
  modified_base 1: mod_base = OTHER; note = 5-methyl beta-D-oxy locked nucleotide with phosphorothioate linkage
  modified_base 2: mod_base = OTHER; note = beta-D-oxy locked nucleotide with phosphorothioate linkage
  modified_base 3: mod_base = OTHER; note = beta-D-oxy locked nucleotide with phosphorothioate linkage
  modified_base 4: mod_base = OTHER; note = Nucleotide with phosphorothioate linkage
  modified_base 5: mod_base = OTHER; note = Nucleotide with phosphorothioate linkage
  modified_base 6: mod_base = OTHER; note = Nucleotide with phosphorothioate linkage
  modified_base 7: mod_base = OTHER; note = Nucleotide with phosphorothioate linkage
  modified_base 8: mod_base = OTHER; note = Nucleotide with phosphorothioate linkage
  modified_base 9: mod_base = OTHER; note = Nucleotide with phosphorothioate linkage
  modified_base 10: mod_base = OTHER; note = Nucleotide with phosphorothioate linkage
  modified_base 11: mod_base = OTHER; note = Nucleotide with phosphorothioate linkage
  modified_base 12: mod_base = OTHER; note = Nucleotide with phosphorothioate linkage
  modified_base 13: mod_base = OTHER; note = Nucleotide with phosphorothioate linkage
  modified_base 14: mod_base = OTHER; note = Nucleotide with phosphorothioate linkage
  modified_base 15: mod_base = OTHER; note = Nucleotide with phosphorothioate linkage
  modified_base 16: mod_base = OTHER; note = beta-D-oxy locked nucleotide with phosphorothioate linkage
  modified_base 17: mod_base = OTHER; note = beta-D-oxy locked nucleotide with phosphorothioate linkage
  modified_base 18: mod_base = OTHER; note = beta-D-oxy locked nucleotide with phosphorothioate linkage
  modified_base 19: mod_base = OTHER; note = beta-D-oxy locked nucleotide with phosphorothioate linkage
cagaaaaccaaatccaata

SEQ ID NO: 484 - DNA, 18 bp, synthetic construct
  source 1..18: mol_type = other DNA
  modified_base 1: mod_base = OTHER; note = beta-D-oxy locked nucleotide with phosphorothioate linkage
  modified_base 2: mod_base = OTHER; note = beta-D-oxy locked nucleotide with phosphorothioate linkage
  modified_base 3: mod_base = OTHER; note = beta-D-oxy locked nucleotide with phosphorothioate linkage
  modified_base 4: mod_base = OTHER; note = 5-methyl beta-D-oxy locked nucleotide with phosphorothioate linkage
  modified_base 5: mod_base = OTHER; note = Nucleotide with phosphorothioate linkage
  modified_base 6: mod_base = OTHER; note = Nucleotide with phosphorothioate linkage
  modified_base 7: mod_base = OTHER; note = Nucleotide with phosphorothioate linkage
  modified_base 8: mod_base = OTHER; note = Nucleotide with phosphorothioate linkage
  modified_base 9: mod_base = OTHER; note = Nucleotide with phosphorothioate linkage
  modified_base 10: mod_base = OTHER; note = Nucleotide with phosphorothioate linkage
  modified_base 11: mod_base = OTHER; note = Nucleotide with phosphorothioate linkage
  modified_base 12: mod_base = OTHER; note = Nucleotide with phosphorothioate linkage
  modified_base 13: mod_base = OTHER; note = Nucleotide with phosphorothioate linkage
  modified_base 14: mod_base = OTHER; note = Nucleotide with phosphorothioate linkage
  modified_base 15: mod_base = OTHER; note = beta-D-oxy locked nucleotide with phosphorothioate linkage
  modified_base 16: mod_base = OTHER; note = beta-D-oxy locked nucleotide with phosphorothioate linkage
  modified_base 17: mod_base = OTHER; note = 5-methyl beta-D-oxy locked nucleotide with phosphorothioate linkage
  modified_base 18: mod_base = OTHER; note = 5-methyl beta-D-oxy locked nucleotide with phosphorothioate linkage
atacagaaaaccaaatcc

SEQ ID NO: 485 - DNA, 20 bp, synthetic construct
  source 1..20: mol_type = other DNA
  modified_base 1: mod_base = OTHER; note = beta-D-oxy locked nucleotide with phosphorothioate linkage
  modified_base 2: mod_base = OTHER; note = beta-D-oxy locked nucleotide with phosphorothioate linkage
  modified_base 3: mod_base = OTHER; note = beta-D-oxy locked nucleotide with phosphorothioate linkage
  modified_base 4: mod_base = OTHER; note = 5-methyl beta-D-oxy locked nucleotide with phosphorothioate linkage
  modified_base 5: mod_base = OTHER; note = Nucleotide with phosphorothioate linkage
  modified_base 6: mod_base = OTHER; note = Nucleotide with phosphorothioate linkage
  modified_base 7: mod_base = OTHER; note = Nucleotide with phosphorothioate linkage
  modified_base 8: mod_base = OTHER; note = Nucleotide with phosphorothioate linkage
  modified_base 9: mod_base = OTHER; note = Nucleotide with phosphorothioate linkage
  modified_base 10: mod_base = OTHER; note = Nucleotide with phosphorothioate linkage
  modified_base 11: mod_base = OTHER; note = Nucleotide with phosphorothioate linkage
  modified_base 12: mod_base = OTHER; note = Nucleotide with phosphorothioate linkage
  modified_base 13: mod_base = OTHER; note = Nucleotide with phosphorothioate linkage
  modified_base 14: mod_base = OTHER; note = Nucleotide with phosphorothioate linkage
  modified_base 15: mod_base = OTHER; note = Nucleotide with phosphorothioate linkage
  modified_base 16: mod_base = OTHER; note = Nucleotide with phosphorothioate linkage
  modified_base 17: mod_base = OTHER; note = beta-D-oxy locked nucleotide with phosphorothioate linkage
  modified_base 18: mod_base = OTHER; note = beta-D-oxy locked nucleotide with phosphorothioate linkage
  modified_base 19: mod_base = OTHER; note = beta-D-oxy locked nucleotide with phosphorothioate linkage
  modified_base 20: mod_base = OTHER; note = beta-D-oxy locked nucleotide with phosphorothioate linkage
tatcaacattaatttaataa

SEQ ID NO: 486 - DNA, 19 bp, synthetic construct
  source 1..19: mol_type = other DNA
  modified_base 1: mod_base = OTHER; note = beta-D-oxy locked nucleotide with phosphorothioate linkage
  modified_base 2: mod_base = OTHER; note = beta-D-oxy locked nucleotide with phosphorothioate linkage
  modified_base 3: mod_base = OTHER; note = 5-methyl beta-D-oxy locked nucleotide with phosphorothioate linkage
  modified_base 4: mod_base = OTHER; note = beta-D-oxy locked nucleotide with phosphorothioate linkage
  modified_base 5: mod_base = OTHER; note = Nucleotide with phosphorothioate linkage
  modified_base 6: mod_base = OTHER; note = Nucleotide with phosphorothioate linkage
  modified_base 7: mod_base = OTHER; note = Nucleotide with phosphorothioate linkage
  modified_base 8: mod_base = OTHER; note = Nucleotide with phosphorothioate linkage
  modified_base 9: mod_base = OTHER; note = Nucleotide with phosphorothioate linkage
  modified_base 10: mod_base = OTHER; note = Nucleotide with phosphorothioate linkage
  modified_base 11: mod_base = OTHER; note = Nucleotide with phosphorothioate linkage
  modified_base 12: mod_base = OTHER; note = Nucleotide with phosphorothioate linkage
  modified_base 13: mod_base = OTHER; note = Nucleotide with phosphorothioate linkage
  modified_base 14: mod_base = OTHER; note = Nucleotide with phosphorothioate linkage
  modified_base 15: mod_base = OTHER; note = Nucleotide with phosphorothioate linkage
  modified_base 16: mod_base = OTHER; note = beta-D-oxy locked nucleotide with phosphorothioate linkage
  modified_base 17: mod_base = OTHER; note = beta-D-oxy locked nucleotide with phosphorothioate linkage
  modified_base 18: mod_base = OTHER; note = beta-D-oxy locked nucleotide with phosphorothioate linkage
  modified_base 19: mod_base = OTHER; note = beta-D-oxy locked nucleotide with phosphorothioate linkage
atcaacattaatttaataa

SEQ ID NO: 487 - DNA, 21 bp, synthetic construct
  source 1..21: mol_type = other DNA
  modified_base 1: mod_base = OTHER; note = beta-D-oxy locked nucleotide with phosphorothioate linkage
  modified_base 2: mod_base = OTHER; note = 5-methyl beta-D-oxy locked nucleotide with phosphorothioate linkage
  modified_base 3: mod_base = OTHER; note = beta-D-oxy locked nucleotide with phosphorothioate linkage
  modified_base 4: mod_base = OTHER; note = beta-D-oxy locked nucleotide with phosphorothioate linkage
  modified_base 5: mod_base = OTHER; note = Nucleotide with phosphorothioate linkage
  modified_base 6: mod_base = OTHER; note = Nucleotide with phosphorothioate linkage
  modified_base 7: mod_base = OTHER; note = Nucleotide with phosphorothioate linkage
  modified_base 8: mod_base = OTHER; note = Nucleotide with phosphorothioate linkage
  modified_base 9: mod_base = OTHER; note = Nucleotide with phosphorothioate linkage
  modified_base 10: mod_base = OTHER; note = Nucleotide with phosphorothioate linkage
  modified_base 11: mod_base = OTHER; note = Nucleotide with phosphorothioate linkage
  modified_base 12: mod_base = OTHER; note = Nucleotide with phosphorothioate linkage
  modified_base 13: mod_base = OTHER; note = Nucleotide with phosphorothioate linkage
  modified_base 14: mod_base = OTHER; note = Nucleotide with phosphorothioate linkage
  modified_base 15: mod_base = OTHER; note = Nucleotide with phosphorothioate linkage
  modified_base 16: mod_base = OTHER; note = Nucleotide with phosphorothioate linkage
  modified_base 17: mod_base = OTHER; note = Nucleotide with phosphorothioate linkage
  modified_base 18: mod_base = OTHER; note = beta-D-oxy locked nucleotide with phosphorothioate linkage
  modified_base 19: mod_base = OTHER; note = beta-D-oxy locked nucleotide with phosphorothioate linkage
  modified_base 20: mod_base = OTHER; note = beta-D-oxy locked nucleotide with phosphorothioate linkage
  modified_base 21: mod_base = OTHER; note = beta-D-oxy locked nucleotide with phosphorothioate linkage
acaaatatcaacattaattta

SEQ ID NO: 488 - DNA, 20 bp, synthetic construct
  source 1..20: mol_type = other DNA
  modified_base 1: mod_base = OTHER; note = 5-methyl beta-D-oxy locked nucleotide with phosphorothioate linkage
  modified_base 2: mod_base = OTHER; note = beta-D-oxy locked nucleotide with phosphorothioate linkage
  modified_base 3: mod_base = OTHER; note = beta-D-oxy locked nucleotide with phosphorothioate linkage
  modified_base 4: mod_base = OTHER; note = beta-D-oxy locked nucleotide with phosphorothioate linkage
  modified_base 5: mod_base = OTHER; note = Nucleotide with phosphorothioate linkage
  modified_base 6: mod_base = OTHER; note = Nucleotide with phosphorothioate linkage
  modified_base 7: mod_base = OTHER; note = Nucleotide with phosphorothioate linkage
  modified_base 8: mod_base = OTHER; note = Nucleotide with phosphorothioate linkage
  modified_base 9: mod_base = OTHER; note = Nucleotide with phosphorothioate linkage
  modified_base 10: mod_base = OTHER; note = Nucleotide with phosphorothioate linkage
  modified_base 11: mod_base = OTHER; note = Nucleotide with phosphorothioate linkage
  modified_base 12: mod_base = OTHER; note = Nucleotide with phosphorothioate linkage
  modified_base 13: mod_base = OTHER; note = Nucleotide with phosphorothioate linkage
  modified_base 14: mod_base = OTHER; note = Nucleotide with phosphorothioate linkage
  modified_base 15: mod_base = OTHER; note = Nucleotide with phosphorothioate linkage
  modified_base 16: mod_base = OTHER; note = Nucleotide with phosphorothioate linkage
  modified_base 17: mod_base = OTHER; note = beta-D-oxy locked nucleotide with phosphorothioate linkage
  modified_base 18: mod_base = OTHER; note = beta-D-oxy locked nucleotide with phosphorothioate linkage
  modified_base 19: mod_base = OTHER; note = beta-D-oxy locked nucleotide with phosphorothioate linkage
  modified_base 20: mod_base = OTHER; note = beta-D-oxy locked nucleotide with phosphorothioate linkage
caaatatcaacattaattta

SEQ ID NO: 489 - DNA, 15 bp, synthetic construct
  source 1..15: mol_type = other DNA
  modified_base 1: mod_base = OTHER; note = 5-methyl beta-D-oxy locked nucleotide with phosphorothioate linkage
  modified_base 2: mod_base = OTHER; note = 5-methyl beta-D-oxy locked nucleotide with phosphorothioate linkage
  modified_base 3: mod_base = OTHER; note = beta-D-oxy locked nucleotide with phosphorothioate linkage
  modified_base 4: mod_base = OTHER; note = beta-D-oxy locked nucleotide with phosphorothioate linkage
  modified_base 5: mod_base = OTHER; note = Nucleotide with phosphorothioate linkage
  modified_base 6: mod_base = OTHER; note = Nucleotide with phosphorothioate linkage
  modified_base 7: mod_base = OTHER; note = Nucleotide with phosphorothioate linkage
  modified_base 8: mod_base = OTHER; note = Nucleotide with phosphorothioate linkage
  modified_base 9: mod_base = OTHER; note = Nucleotide with phosphorothioate linkage
  modified_base 10: mod_base = OTHER; note = Nucleotide with phosphorothioate linkage
  modified_base 11: mod_base = OTHER; note = Nucleotide with phosphorothioate linkage
  modified_base 12: mod_base = OTHER; note = Nucleotide with phosphorothioate linkage
  modified_base 13: mod_base = OTHER; note = Nucleotide with phosphorothioate linkage
  modified_base 14: mod_base = OTHER; note = beta-D-oxy locked nucleotide with phosphorothioate linkage
  modified_base 15: mod_base = OTHER; note = beta-D-oxy locked nucleotide with phosphorothioate linkage
cctacgttgacattt

SEQ ID NO: 490 - DNA, 17 bp, synthetic construct
  source 1..17: mol_type = other DNA
  modified_base 1: mod_base = OTHER; note = beta-D-oxy locked nucleotide with phosphorothioate linkage
  modified_base 2: mod_base = OTHER; note = beta-D-oxy locked nucleotide with phosphorothioate linkage
  modified_base 3: mod_base = OTHER; note = Nucleotide with phosphorothioate linkage
  modified_base 4: mod_base = OTHER; note = Nucleotide with phosphorothioate linkage
  modified_base 5: mod_base = OTHER; note = Nucleotide with phosphorothioate linkage
  modified_base 6: mod_base = OTHER; note = Nucleotide with phosphorothioate linkage
  modified_base 7: mod_base = OTHER; note = Nucleotide with phosphorothioate linkage
  modified_base 8: mod_base = OTHER; note = Nucleotide with phosphorothioate linkage
  modified_base 9: mod_base = OTHER; note = Nucleotide with phosphorothioate linkage
  modified_base 10: mod_base = OTHER; note = Nucleotide with phosphorothioate linkage
  modified_base 11: mod_base = OTHER; note = Nucleotide with phosphorothioate linkage
  modified_base 12: mod_base = OTHER; note = Nucleotide with phosphorothioate linkage
  modified_base 13: mod_base = OTHER; note = Nucleotide with phosphorothioate linkage
  modified_base 14: mod_base = OTHER; note = Nucleotide with phosphorothioate linkage
  modified_base 15: mod_base = OTHER; note = Nucleotide with phosphorothioate linkage
  modified_base 16: mod_base = OTHER; note = beta-D-oxy locked nucleotide with phosphorothioate linkage
  modified_base 17: mod_base = OTHER; note = beta-D-oxy locked nucleotide with phosphorothioate linkage
attattccatccacctt

SEQ ID NO: 491 - DNA, 18 bp, synthetic construct
  source 1..18: mol_type = other DNA
  modified_base 1: mod_base = OTHER; note = beta-D-oxy locked nucleotide with phosphorothioate linkage
  modified_base 2: mod_base = OTHER; note = beta-D-oxy locked nucleotide with phosphorothioate linkage
  modified_base 3: mod_base = OTHER; note = Nucleotide with phosphorothioate linkage
  modified_base 4: mod_base = OTHER; note = Nucleotide with phosphorothioate linkage
  modified_base 5: mod_base = OTHER; note = Nucleotide with phosphorothioate linkage
  modified_base 6: mod_base = OTHER; note = Nucleotide with phosphorothioate linkage
  modified_base 7: mod_base = OTHER; note = Nucleotide with phosphorothioate linkage
  modified_base 8: mod_base = OTHER; note = Nucleotide with phosphorothioate linkage
  modified_base 9: mod_base = OTHER; note = Nucleotide with phosphorothioate linkage
  modified_base 10: mod_base = OTHER; note = Nucleotide with phosphorothioate linkage
  modified_base 11: mod_base = OTHER; note = Nucleotide with phosphorothioate linkage
  modified_base 12: mod_base = OTHER; note = Nucleotide with phosphorothioate linkage
  modified_base 13: mod_base = OTHER; note = Nucleotide with phosphorothioate linkage
  modified_base 14: mod_base = OTHER; note = Nucleotide with phosphorothioate linkage
  modified_base 15: mod_base = OTHER; note = Nucleotide with phosphorothioate linkage
  modified_base 16: mod_base = OTHER; note = Nucleotide with phosphorothioate linkage
  modified_base 17: mod_base = OTHER; note = 5-methyl beta-D-oxy locked nucleotide with phosphorothioate linkage
  modified_base 18: mod_base = OTHER; note = beta-D-oxy locked nucleotide with phosphorothioate linkage
tgattattccatccacct

SEQ ID NO: 492 - DNA, 17 bp, synthetic construct
  source 1..17: mol_type = other DNA
  modified_base 1: mod_base = OTHER; note = beta-D-oxy locked nucleotide with phosphorothioate linkage
  modified_base 2: mod_base = OTHER; note = beta-D-oxy locked nucleotide with phosphorothioate linkage
  modified_base 3: mod_base = OTHER; note = beta-D-oxy locked nucleotide with phosphorothioate linkage
  modified_base 4: mod_base = OTHER; note = Nucleotide with phosphorothioate linkage
  modified_base 5: mod_base = OTHER; note = Nucleotide with phosphorothioate linkage
  modified_base 6: mod_base = OTHER; note = Nucleotide with phosphorothioate linkage
  modified_base 7: mod_base = OTHER; note = Nucleotide with phosphorothioate linkage
  modified_base 8: mod_base = OTHER; note = Nucleotide with phosphorothioate linkage
  modified_base 9: mod_base = OTHER; note = Nucleotide with phosphorothioate linkage
  modified_base 10: mod_base = OTHER; note = Nucleotide with phosphorothioate linkage
  modified_base 11: mod_base = OTHER; note = Nucleotide with phosphorothioate linkage
  modified_base 12: mod_base = OTHER; note = Nucleotide with phosphorothioate linkage
  modified_base 13: mod_base = OTHER; note = Nucleotide with phosphorothioate linkage
  modified_base 14: mod_base = OTHER; note = Nucleotide with phosphorothioate linkage
  modified_base 15: mod_base = OTHER; note = Nucleotide with phosphorothioate linkage
  modified_base 16: mod_base = OTHER; note = beta-D-oxy locked nucleotide with phosphorothioate linkage
  modified_base 17: mod_base = OTHER; note = 5-methyl beta-D-oxy locked nucleotide with phosphorothioate linkage
ttgattattccatccac

SEQ ID NO: 493 - DNA, 18 bp, synthetic construct
  source 1..18: mol_type = other DNA
  modified_base 1: mod_base = OTHER; note = beta-D-oxy locked nucleotide with phosphorothioate linkage
  modified_base 2: mod_base = OTHER; note = beta-D-oxy locked nucleotide with phosphorothioate linkage
  modified_base 3: mod_base = OTHER; note = 5-methyl beta-D-oxy locked nucleotide with phosphorothioate linkage
  modified_base 4: mod_base = OTHER; note = beta-D-oxy locked nucleotide with phosphorothioate linkage
  modified_base 5: mod_base = OTHER; note = Nucleotide with phosphorothioate linkage
  modified_base 6: mod_base = OTHER; note = Nucleotide with phosphorothioate linkage
  modified_base 7: mod_base = OTHER; note = Nucleotide with phosphorothioate linkage
  modified_base 8: mod_base = OTHER; note = Nucleotide with phosphorothioate linkage
  modified_base 9: mod_base = OTHER; note = Nucleotide with phosphorothioate linkage
  modified_base 10: mod_base = OTHER; note = Nucleotide with phosphorothioate linkage
  modified_base 11: mod_base = OTHER; note = Nucleotide with phosphorothioate linkage
  modified_base 12: mod_base = OTHER; note = Nucleotide with phosphorothioate linkage
  modified_base 13: mod_base = OTHER; note = Nucleotide with phosphorothioate linkage
  modified_base 14: mod_base = OTHER; note = Nucleotide with phosphorothioate linkage
  modified_base 15: mod_base = OTHER; note = Nucleotide with phosphorothioate linkage
  modified_base 16: mod_base = OTHER; note = Nucleotide with phosphorothioate linkage
  modified_base 17: mod_base = OTHER; note = beta-D-oxy locked nucleotide with phosphorothioate linkage
  modified_base 18: mod_base = OTHER; note = beta-D-oxy locked nucleotide with phosphorothioate linkage
gacagactccttcaaaaa

SEQ ID NO: 494 - DNA, 16 bp, synthetic construct
  source 1..16: mol_type = other DNA
  modified_base 1: mod_base = OTHER; note = beta-D-oxy locked nucleotide with phosphorothioate linkage
  modified_base 2: mod_base = OTHER; note = beta-D-oxy locked nucleotide with phosphorothioate linkage
  modified_base 3: mod_base = OTHER; note = beta-D-oxy locked nucleotide with phosphorothioate linkage
  modified_base 4: mod_base = OTHER; note = Nucleotide with phosphorothioate linkage
  modified_base 5: mod_base = OTHER; note = Nucleotide with phosphorothioate linkage
  modified_base 6: mod_base = OTHER; note = Nucleotide with phosphorothioate linkage
  modified_base 7: mod_base = OTHER; note = Nucleotide with phosphorothioate linkage
  modified_base 8: mod_base = OTHER; note = Nucleotide with phosphorothioate linkage
  modified_base 9: mod_base = OTHER; note = Nucleotide with phosphorothioate linkage
  modified_base 10: mod_base = OTHER; note = Nucleotide with phosphorothioate linkage
  modified_base 11: mod_base = OTHER; note = Nucleotide with phosphorothioate linkage
  modified_base 12: mod_base = OTHER; note = Nucleotide with phosphorothioate linkage
  modified_base 13: mod_base = OTHER; note = beta-D-oxy locked nucleotide with phosphorothioate linkage
  modified_base 14: mod_base = OTHER; note = beta-D-oxy locked nucleotide with phosphorothioate linkage
  modified_base 15: mod_base = OTHER; note = beta-D-oxy locked nucleotide with phosphorothioate linkage
  modified_base 16: mod_base = OTHER; note = beta-D-oxy locked nucleotide with phosphorothioate linkage
attgcccgtttcttta

SEQ ID NO: 495 - DNA, 16 bp, synthetic construct
  source 1..16: mol_type = other DNA
  modified_base 1: mod_base = OTHER; note = beta-D-oxy locked nucleotide with phosphorothioate linkage
  modified_base 2: mod_base = OTHER; note = beta-D-oxy locked nucleotide with phosphorothioate linkage
  modified_base 3: mod_base = OTHER; note = beta-D-oxy locked nucleotide with phosphorothioate linkage
  modified_base 4: mod_base = OTHER; note = beta-D-oxy locked nucleotide with phosphorothioate linkage
  modified_base 5: mod_base = OTHER; note = Nucleotide with phosphorothioate linkage
  modified_base 6: mod_base = OTHER; note = Nucleotide with phosphorothioate linkage
  modified_base 7: mod_base = OTHER; note = Nucleotide with phosphorothioate linkage
  modified_base 8: mod_base = OTHER; note = Nucleotide with phosphorothioate linkage
  modified_base 9: mod_base = OTHER; note = Nucleotide with phosphorothioate linkage
  modified_base 10: mod_base = OTHER; note = Nucleotide with phosphorothioate linkage
  modified_base 11: mod_base = OTHER; note = Nucleotide with phosphorothioate linkage
  modified_base 12: mod_base = OTHER; note = Nucleotide with phosphorothioate linkage
  modified_base 13: mod_base = OTHER; note = Nucleotide with phosphorothioate linkage
  modified_base 14: mod_base = OTHER; note = Nucleotide with phosphorothioate linkage
  modified_base 15: mod_base = OTHER; note = 5-methyl beta-D-oxy locked nucleotide with phosphorothioate linkage
  modified_base 16: mod_base = OTHER; note = beta-D-oxy locked nucleotide with phosphorothioate linkage
ttgataacagatccca

SEQ ID NO: 496 - DNA, 18 bp, synthetic construct
  source 1..18: mol_type = other DNA
  modified_base 1: mod_base = OTHER; note = 5-methyl beta-D-oxy locked nucleotide with phosphorothioate linkage
  modified_base 2: mod_base = OTHER; note = beta-D-oxy locked nucleotide with phosphorothioate linkage
  modified_base 3: mod_base = OTHER; note = 5-methyl beta-D-oxy locked nucleotide with phosphorothioate linkage
  modified_base 4: mod_base = OTHER; note = Nucleotide with phosphorothioate linkage
  modified_base 5: mod_base = OTHER; note = Nucleotide with phosphorothioate linkage
  modified_base 6: mod_base = OTHER; note = Nucleotide with phosphorothioate linkage
  modified_base 7: mod_base = OTHER; note = Nucleotide with phosphorothioate linkage
  modified_base 8: mod_base = OTHER; note = Nucleotide with phosphorothioate linkage
  modified_base 9: mod_base = OTHER; note = Nucleotide with phosphorothioate linkage
  modified_base 10: mod_base = OTHER; note = Nucleotide with phosphorothioate linkage
  modified_base 11: mod_base = OTHER; note = Nucleotide with phosphorothioate linkage
  modified_base 12: mod_base = OTHER; note = Nucleotide with phosphorothioate linkage
  modified_base 13: mod_base = OTHER; note = Nucleotide with phosphorothioate linkage
  modified_base 14: mod_base = OTHER; note = Nucleotide with phosphorothioate linkage
  modified_base 15: mod_base = OTHER; note = Nucleotide with phosphorothioate linkage
  modified_base 16: mod_base = OTHER; note = Nucleotide with phosphorothioate linkage
  modified_base 17: mod_base = OTHER; note = beta-D-oxy locked nucleotide with phosphorothioate linkage
  modified_base 18: mod_base = OTHER; note = beta-D-oxy locked nucleotide with phosphorothioate linkage
ctctaacacaattctcta

SEQ ID NO: 497 - DNA, 21 bp, synthetic construct
  source 1..21: mol_type = other DNA
  modified_base 1: mod_base = OTHER; note = 5-methyl beta-D-oxy locked nucleotide with phosphorothioate linkage
  modified_base 2: mod_base = OTHER; note = beta-D-oxy locked nucleotide with phosphorothioate linkage
  modified_base 3: mod_base = OTHER; note = Nucleotide with phosphorothioate linkage
  modified_base 4: mod_base = OTHER; note = Nucleotide with phosphorothioate linkage
  modified_base 5: mod_base = OTHER; note = Nucleotide with phosphorothioate linkage
  modified_base 6: mod_base = OTHER; note = Nucleotide with phosphorothioate linkage
  modified_base 7: mod_base = OTHER; note = Nucleotide with phosphorothioate linkage
  modified_base 8: mod_base = OTHER; note = Nucleotide with phosphorothioate linkage
  modified_base 9: mod_base = OTHER; note = Nucleotide with phosphorothioate linkage
  modified_base 10: mod_base = OTHER; note = Nucleotide with phosphorothioate linkage
  modified_base 11: mod_base = OTHER; note = Nucleotide with phosphorothioate linkage
  modified_base 12: mod_base = OTHER; note = Nucleotide with phosphorothioate linkage
  modified_base 13: mod_base = OTHER; note = Nucleotide with phosphorothioate linkage
  modified_base 14: mod_base = OTHER; note = Nucleotide with phosphorothioate linkage
  modified_base 15: mod_base = OTHER; note = Nucleotide with phosphorothioate linkage
  modified_base 16: mod_base = OTHER; note = Nucleotide with phosphorothioate linkage
  modified_base 17: mod_base = OTHER; note = Nucleotide with phosphorothioate linkage
  modified_base 18: mod_base = OTHER; note = Nucleotide with phosphorothioate linkage
  modified_base 19: mod_base = OTHER; note = Nucleotide with phosphorothioate linkage
  modified_base 20: mod_base = OTHER; note = beta-D-oxy locked nucleotide with phosphorothioate linkage
  modified_base 21: mod_base = OTHER; note = beta-D-oxy locked nucleotide with phosphorothioate linkage
cttctctaacacaattctcta

SEQ ID NO: 498 - DNA, 17 bp, synthetic construct
  source 1..17: mol_type = other DNA
  modified_base 1: mod_base = OTHER; note = beta-D-oxy locked nucleotide with phosphorothioate linkage
  modified_base 2: mod_base = OTHER; note = 5-methyl beta-D-oxy locked nucleotide with phosphorothioate linkage
  modified_base 3: mod_base = OTHER; note = beta-D-oxy locked nucleotide with phosphorothioate linkage
  modified_base 4: mod_base = OTHER; note = 5-methyl beta-D-oxy locked nucleotide with phosphorothioate linkage
  modified_base 5: mod_base = OTHER; note = Nucleotide with phosphorothioate linkage
  modified_base 6: mod_base = OTHER; note = Nucleotide with phosphorothioate linkage
  modified_base 7: mod_base = OTHER; note = Nucleotide with phosphorothioate linkage
  modified_base 8: mod_base = OTHER; note = Nucleotide with phosphorothioate linkage
  modified_base 9: mod_base = OTHER; note = Nucleotide with phosphorothioate linkage
  modified_base 10: mod_base = OTHER; note = Nucleotide with phosphorothioate linkage
  modified_base 11: mod_base = OTHER; note = Nucleotide with phosphorothioate linkage
  modified_base 12: mod_base = OTHER; note = Nucleotide with phosphorothioate linkage
  modified_base 13: mod_base = OTHER; note = Nucleotide with phosphorothioate linkage
  modified_base 14: mod_base = OTHER; note = Nucleotide with phosphorothioate linkage
  modified_base 15: mod_base = OTHER; note = 5-methyl beta-D-oxy locked nucleotide with phosphorothioate linkage
  modified_base 16: mod_base = OTHER; note = beta-D-oxy locked nucleotide with phosphorothioate linkage
  modified_base 17: mod_base = OTHER; note = 5-methyl beta-D-oxy locked nucleotide with phosphorothioate linkage
tctctaacacaattctc

SEQ ID NO: 499 - DNA, 19 bp, synthetic construct
  source 1..19: mol_type = other DNA
  modified_base 1: mod_base = OTHER; note = beta-D-oxy locked nucleotide with phosphorothioate linkage
  modified_base 2: mod_base = OTHER; note = beta-D-oxy locked nucleotide with phosphorothioate linkage
  modified_base 3: mod_base = OTHER; note = Nucleotide with phosphorothioate linkage
  modified_base 4: mod_base = OTHER; note = Nucleotide with phosphorothioate linkage
  modified_base 5: mod_base = OTHER; note = Nucleotide with phosphorothioate linkage
  modified_base 6: mod_base = OTHER; note = Nucleotide with phosphorothioate linkage
  modified_base 7: mod_base = OTHER; note = Nucleotide with phosphorothioate linkage
  modified_base 8: mod_base = OTHER; note = Nucleotide with phosphorothioate linkage
  modified_base 9: mod_base = OTHER; note = Nucleotide with phosphorothioate linkage
  modified_base 10: mod_base = OTHER; note = Nucleotide with phosphorothioate linkage
  modified_base 11: mod_base = OTHER; note = Nucleotide with phosphorothioate linkage
  modified_base 12: mod_base = OTHER; note = Nucleotide with phosphorothioate linkage
  modified_base 13: mod_base = OTHER; note = Nucleotide with phosphorothioate linkage
  modified_base 14: mod_base = OTHER; note = Nucleotide with phosphorothioate linkage
  modified_base 15: mod_base = OTHER; note = Nucleotide with phosphorothioate linkage
  modified_base 16: mod_base = OTHER; note = Nucleotide with phosphorothioate linkage
  modified_base 17: mod_base = OTHER; note = Nucleotide with phosphorothioate linkage
  modified_base 18: mod_base = OTHER; note = beta-D-oxy locked nucleotide with phosphorothioate linkage
  modified_base 19: mod_base = OTHER; note = beta-D-oxy locked nucleotide with phosphorothioate linkage
agcaccttctctaacacaa

SEQ ID NO: 500 - DNA, 17 bp, synthetic construct
  source 1..17: mol_type = other DNA
  modified_base 1: mod_base = OTHER; note = beta-D-oxy locked nucleotide with phosphorothioate linkage
  modified_base 2: mod_base = OTHER; note = 5-methyl beta-D-oxy locked nucleotide with phosphorothioate linkage
  modified_base 3: mod_base = OTHER; note = Nucleotide with phosphorothioate linkage
  modified_base 4: mod_base = OTHER; note = Nucleotide with phosphorothioate linkage
  modified_base 5: mod_base = OTHER; note = Nucleotide with phosphorothioate linkage
  modified_base 6: mod_base = OTHER; note = Nucleotide with phosphorothioate linkage
  modified_base 7: mod_base = OTHER; note = Nucleotide with phosphorothioate linkage
  modified_base 8: mod_base = OTHER; note = Nucleotide with phosphorothioate linkage
  modified_base 9: mod_base = OTHER; note = Nucleotide with phosphorothioate linkage
  modified_base 10: mod_base = OTHER; note = Nucleotide with phosphorothioate linkage
  modified_base 11: mod_base = OTHER; note = Nucleotide with phosphorothioate linkage
  modified_base 12: mod_base = OTHER; note = Nucleotide with phosphorothioate linkage
  modified_base 13: mod_base = OTHER; note = Nucleotide with phosphorothioate linkage
  modified_base 14: mod_base = OTHER; note = Nucleotide with phosphorothioate linkage
  modified_base 15: mod_base = OTHER; note = Nucleotide with phosphorothioate linkage
  modified_base 16: mod_base = OTHER; note = 5-methyl beta-D-oxy locked nucleotide with phosphorothioate linkage
  modified_base 17: mod_base = OTHER; note = beta-D-oxy locked nucleotide with phosphorothioate linkage
gcaccttctctaacaca

SEQ ID NO: 501 - DNA, 18 bp, synthetic construct
  source 1..18: mol_type = other DNA
  modified_base 1: mod_base = OTHER; note = 5-methyl beta-D-oxy locked nucleotide with phosphorothioate linkage
  modified_base 2: mod_base = OTHER; note = beta-D-oxy locked nucleotide with phosphorothioate linkage
  modified_base 3: mod_base = OTHER; note = Nucleotide with phosphorothioate linkage
  modified_base 4: mod_base = OTHER; note = Nucleotide with phosphorothioate linkage
  modified_base 5: mod_base = OTHER; note = Nucleotide with phosphorothioate linkage
  modified_base 6: mod_base = OTHER; note = Nucleotide with phosphorothioate linkage
  modified_base 7: mod_base = OTHER; note = Nucleotide with phosphorothioate linkage
  modified_base 8: mod_base = OTHER; note = Nucleotide with phosphorothioate linkage
  modified_base 9: mod_base = OTHER; note = Nucleotide with phosphorothioate linkage
  modified_base 10: mod_base = OTHER; note = Nucleotide with phosphorothioate linkage
  modified_base 11: mod_base = OTHER; note = Nucleotide with phosphorothioate linkage
  modified_base 12: mod_base = OTHER; note = Nucleotide with phosphorothioate linkage
  modified_base 13: mod_base = OTHER; note = Nucleotide with phosphorothioate linkage
  modified_base 14: mod_base = OTHER; note = Nucleotide with phosphorothioate linkage
  modified_base 15: mod_base = OTHER; note = Nucleotide with phosphorothioate linkage
  modified_base 16: mod_base = OTHER; note = Nucleotide with phosphorothioate linkage
  modified_base 17: mod_base = OTHER; note = beta-D-oxy locked nucleotide with phosphorothioate linkage
  modified_base 18: mod_base = OTHER; note = 5-methyl beta-D-oxy locked nucleotide with phosphorothioate linkage
cagcaccttctctaacac

SEQ ID NO: 502 - DNA, 17 bp, synthetic construct
  source 1..17: mol_type = other DNA
  modified_base 1: mod_base = OTHER; note = 5-methyl beta-D-oxy locked nucleotide with phosphorothioate linkage
  modified_base 2: mod_base = OTHER; note = beta-D-oxy locked nucleotide with phosphorothioate linkage
  modified_base 3: mod_base = OTHER; note = beta-D-oxy locked nucleotide with phosphorothioate linkage
  modified_base 4: mod_base = OTHER; note = Nucleotide with phosphorothioate linkage
  modified_base 5: mod_base = OTHER; note = Nucleotide with phosphorothioate linkage
  modified_base 6: mod_base = OTHER; note = Nucleotide with phosphorothioate linkage
  modified_base 7: mod_base = OTHER; note = Nucleotide with phosphorothioate linkage
  modified_base 8: mod_base = OTHER; note = Nucleotide with phosphorothioate linkage
  modified_base 9: mod_base = OTHER; note = Nucleotide with phosphorothioate linkage
  modified_base 10: mod_base = OTHER; note = Nucleotide with phosphorothioate linkage
  modified_base 11: mod_base = OTHER; note = Nucleotide with phosphorothioate linkage
  modified_base 12: mod_base = OTHER; note = Nucleotide with phosphorothioate linkage
  modified_base 13: mod_base = OTHER; note = Nucleotide with phosphorothioate linkage
  modified_base 14: mod_base = OTHER; note = beta-D-oxy locked nucleotide with phosphorothioate linkage
  modified_base 15: mod_base = OTHER; note = 5-methyl beta-D-oxy locked nucleotide with phosphorothioate linkage
  modified_base 16: mod_base = OTHER; note = beta-D-oxy locked nucleotide with phosphorothioate linkage
  modified_base 17: mod_base = OTHER; note = beta-D-oxy locked nucleotide with phosphorothioate linkage
cttgatgaatctctcaa

SEQ ID NO: 503 - DNA, 16 bp, synthetic construct
  source 1..16: mol_type = other DNA
  modified_base 1: mod_base = OTHER; note = beta-D-oxy locked nucleotide with phosphorothioate linkage
  modified_base 2: mod_base = OTHER; note = 5-methyl beta-D-oxy locked nucleotide with phosphorothioate linkage
  modified_base 3: mod_base = OTHER; note = Nucleotide with phosphorothioate linkage
  modified_base 4: mod_base = OTHER; note = Nucleotide with phosphorothioate linkage
  modified_base 5: mod_base = OTHER; note = Nucleotide with phosphorothioate linkage
  modified_base 6: mod_base = OTHER; note = Nucleotide with phosphorothioate linkage
  modified_base 7: mod_base = OTHER; note = Nucleotide with phosphorothioate linkage
  modified_base 8: mod_base = OTHER; note = Nucleotide with phosphorothioate linkage
  modified_base 9: mod_base = OTHER; note = Nucleotide with phosphorothioate linkage
  modified_base 10: mod_base = OTHER; note = Nucleotide with phosphorothioate linkage
  modified_base 11: mod_base = OTHER; note = Nucleotide with phosphorothioate linkage
  modified_base 12: mod_base = OTHER; note = Nucleotide with phosphorothioate linkage
  modified_base 13: mod_base = OTHER; note = Nucleotide with phosphorothioate linkage
  modified_base 14: mod_base = OTHER; note = Nucleotide with phosphorothioate linkage
  modified_base 15: mod_base = OTHER; note = 5-methyl beta-D-oxy locked nucleotide with phosphorothioate linkage
  modified_base 16: mod_base = OTHER; note = 5-methyl beta-D-oxy locked nucleotide with phosphorothioate linkage
acacccataatcaccc

SEQ ID NO: 504 - DNA, 18 bp, synthetic construct
  source 1..18: mol_type = other DNA
  modified_base 1: mod_base = OTHER; note = beta-D-oxy locked nucleotide with phosphorothioate linkage
  modified_base 2: mod_base = OTHER; note = beta-D-oxy locked nucleotide with phosphorothioate linkage
  modified_base 3: mod_base = OTHER; note = Nucleotide with phosphorothioate linkage
  modified_base 4: mod_base = OTHER; note = Nucleotide with phosphorothioate linkage
  modified_base 5: mod_base = OTHER; note = Nucleotide with phosphorothioate linkage
  modified_base 6: mod_base = OTHER; note = Nucleotide with phosphorothioate linkage
  modified_base 7: mod_base = OTHER; note = Nucleotide with phosphorothioate linkage
  modified_base 8: mod_base = OTHER; note = Nucleotide with phosphorothioate linkage
  modified_base 9: mod_base = OTHER; note = Nucleotide with phosphorothioate linkage
  modified_base 10: mod_base = OTHER; note = Nucleotide with phosphorothioate linkage
  modified_base 11: mod_base = OTHER; note = Nucleotide with phosphorothioate linkage
  modified_base 12: mod_base = OTHER; note = Nucleotide with phosphorothioate linkage
  modified_base 13: mod_base = OTHER; note = Nucleotide with phosphorothioate linkage
  modified_base 14: mod_base = OTHER; note = Nucleotide with phosphorothioate linkage
  modified_base 15: mod_base = OTHER; note = Nucleotide with phosphorothioate linkage
  modified_base 16: mod_base = OTHER; note = Nucleotide with phosphorothioate linkage
  modified_base 17: mod_base = OTHER; note = beta-D-oxy locked nucleotide with phosphorothioate linkage
  modified_base 18: mod_base = OTHER; note = 5-methyl beta-D-oxy locked nucleotide with phosphorothioate linkage
agccacacccataatcac

SEQ ID NO: 505 - DNA, 17 bp, synthetic construct
  source 1..17: mol_type = other DNA
  modified_base 1: mod_base = OTHER; note = 5-methyl beta-D-oxy locked nucleotide with phosphorothioate linkage
  modified_base 2: mod_base = OTHER; note = beta-D-oxy locked nucleotide with phosphorothioate linkage
  modified_base 3: mod_base = OTHER; note = Nucleotide with phosphorothioate linkage
  modified_base 4: mod_base = OTHER; note = Nucleotide with phosphorothioate linkage
  modified_base 5: mod_base = OTHER; note = Nucleotide with phosphorothioate linkage
  modified_base 6: mod_base = OTHER; note = Nucleotide with phosphorothioate linkage
  modified_base 7: mod_base = OTHER; note = Nucleotide with phosphorothioate linkage
  modified_base 8: mod_base = OTHER; note = Nucleotide with phosphorothioate linkage
  modified_base 9: mod_base = OTHER; note = Nucleotide with phosphorothioate linkage
  modified_base 10: mod_base = OTHER; note = Nucleotide with phosphorothioate linkage
  modified_base 11: mod_base = OTHER; note = Nucleotide with phosphorothioate linkage
  modified_base 12: mod_base = OTHER; note = Nucleotide with phosphorothioate linkage
  modified_base 13: mod_base = OTHER; note = Nucleotide with phosphorothioate linkage
  modified_base 14: mod_base = OTHER; note = Nucleotide with phosphorothioate linkage
  modified_base 15: mod_base = OTHER; note = Nucleotide with phosphorothioate linkage
  modified_base 16: mod_base = OTHER; note = beta-D-oxy locked nucleotide with phosphorothioate linkage
  modified_base 17: mod_base = OTHER; note = beta-D-oxy locked nucleotide with phosphorothioate linkage
catagccacacccataa

SEQ ID NO: 506 - DNA, 17 bp, synthetic construct
  source 1..17: mol_type = other DNA
  modified_base 1: mod_base = OTHER; note = beta-D-oxy locked nucleotide with phosphorothioate linkage
  modified_base 2: mod_base = OTHER; note = beta-D-oxy locked nucleotide with phosphorothioate linkage
  modified_base 3: mod_base = OTHER; note = Nucleotide with phosphorothioate linkage
  modified_base 4: mod_base = OTHER; note = Nucleotide with phosphorothioate linkage
  modified_base 5: mod_base = OTHER; note = Nucleotide with phosphorothioate linkage
  modified_base 6: mod_base = OTHER; note = Nucleotide with phosphorothioate linkage
  modified_base 7: mod_base = OTHER; note = Nucleotide with phosphorothioate linkage
  modified_base 8: mod_base = OTHER; note = Nucleotide with phosphorothioate linkage
  modified_base 9: mod_base = OTHER; note = Nucleotide with phosphorothioate linkage
  modified_base 10: mod_base = OTHER; note = Nucleotide with phosphorothioate linkage
  modified_base 11: mod_base = OTHER; note = Nucleotide with phosphorothioate linkage
  modified_base 12: mod_base = OTHER; note = Nucleotide with phosphorothioate linkage
  modified_base 13: mod_base = OTHER; note = Nucleotide with phosphorothioate linkage
  modified_base 14: mod_base = OTHER; note = Nucleotide with phosphorothioate linkage
  modified_base 15: mod_base = OTHER; note = Nucleotide with phosphorothioate linkage
  modified_base 16: mod_base = OTHER; note = 5-methyl beta-D-oxy locked nucleotide with phosphorothioate linkage
  modified_base 17: mod_base = OTHER; note = 5-methyl beta-D-oxy locked nucleotide with phosphorothioate linkage
aatagacagtcactccc

SEQ ID NO: 507 - DNA, 16 bp, synthetic construct
  source 1..16: mol_type = other DNA
  modified_base 1: mod_base = OTHER; note = beta-D-oxy locked nucleotide with phosphorothioate linkage
  modified_base 2: mod_base = OTHER; note = beta-D-oxy locked nucleotide with phosphorothioate linkage
  modified_base 3: mod_base = OTHER; note = Nucleotide with phosphorothioate linkage
  modified_base 4: mod_base = OTHER; note = Nucleotide with phosphorothioate linkage
  modified_base 5: mod_base = OTHER; note = Nucleotide with phosphorothioate linkage
  modified_base 6: mod_base = OTHER; note = Nucleotide with phosphorothioate linkage
  modified_base 7: mod_base = OTHER; note = Nucleotide with phosphorothioate linkage
  modified_base 8: mod_base = OTHER; note = Nucleotide with phosphorothioate linkage
  modified_base 9: mod_base = OTHER; note = Nucleotide with phosphorothioate linkage
  modified_base 10: mod_base = OTHER; note = Nucleotide with phosphorothioate linkage
  modified_base 11: mod_base = OTHER; note = Nucleotide with phosphorothioate linkage
  modified_base 12: mod_base = OTHER; note = Nucleotide with phosphorothioate linkage
  modified_base 13: mod_base = OTHER; note = beta-D-oxy locked nucleotide with phosphorothioate linkage
  modified_base 14: mod_base = OTHER; note = beta-D-oxy locked nucleotide with phosphorothioate linkage
  modified_base 15: mod_base = OTHER; note = beta-D-oxy locked nucleotide with phosphorothioate linkage
  modified_base 16: mod_base = OTHER; note = 5-methyl beta-D-oxy locked nucleotide with phosphorothioate linkage
tggaattccacaatac

SEQ ID NO: 508 - DNA, 15 bp, synthetic construct
  source 1..15: mol_type = other DNA
  modified_base 1: mod_base = OTHER; note = beta-D-oxy locked nucleotide with phosphorothioate linkage
  modified_base 2: mod_base = OTHER; note = beta-D-oxy locked nucleotide with phosphorothioate linkage
  modified_base 3: mod_base = OTHER; note = beta-D-oxy locked nucleotide with phosphorothioate linkage
  modified_base 4: mod_base = OTHER; note = beta-D-oxy locked nucleotide with phosphorothioate linkage
  modified_base 5: mod_base = OTHER; note = Nucleotide with phosphorothioate linkage
  modified_base 6: mod_base = OTHER; note = Nucleotide with phosphorothioate linkage
  modified_base 7: mod_base = OTHER; note = Nucleotide with phosphorothioate linkage
  modified_base 8: mod_base = OTHER; note = Nucleotide with phosphorothioate linkage
  modified_base 9: mod_base = OTHER; note = Nucleotide with phosphorothioate linkage
  modified_base 10: mod_base = OTHER; note = Nucleotide with phosphorothioate linkage
  modified_base 11: mod_base = OTHER; note = Nucleotide with phosphorothioate linkage
  modified_base 12: mod_base = OTHER; note = 5-methyl beta-D-oxy locked nucleotide with phosphorothioate linkage
  modified_base 13: mod_base = OTHER; note = beta-D-oxy locked nucleotide with phosphorothioate linkage
  modified_base 14: mod_base = OTHER; note = beta-D-oxy locked nucleotide with phosphorothioate linkage
  modified_base 15: mod_base = OTHER; note = beta-D-oxy locked nucleotide with phosphorothioate linkage
tttaccattcgcaat

SEQ ID NO: 509 - DNA, 15 bp, synthetic construct
  source 1..15: mol_type = other DNA
  modified_base 1: mod_base = OTHER; note = 5-methyl beta-D-oxy locked nucleotide with phosphorothioate linkage
  modified_base 2: mod_base = OTHER; note = beta-D-oxy locked nucleotide with phosphorothioate linkage
  modified_base 3: mod_base = OTHER; note = beta-D-oxy locked nucleotide with phosphorothioate linkage
  modified_base 4: mod_base = OTHER; note = Nucleotide with phosphorothioate linkage
  modified_base 5: mod_base = OTHER; note = Nucleotide with phosphorothioate linkage
  modified_base 6: mod_base = OTHER; note = Nucleotide with phosphorothioate linkage
  modified_base 7: mod_base = OTHER; note = Nucleotide with phosphorothioate linkage
  modified_base 8: mod_base = OTHER; note = Nucleotide with phosphorothioate linkage
  modified_base 9: mod_base = OTHER; note = Nucleotide with phosphorothioate linkage
  modified_base 10: mod_base = OTHER; note = Nucleotide with phosphorothioate linkage
  modified_base 11: mod_base = OTHER; note = Nucleotide with phosphorothioate linkage
  modified_base 12: mod_base = OTHER; note = Nucleotide with phosphorothioate linkage
  modified_base 13: mod_base = OTHER; note = 5-methyl beta-D-oxy locked nucleotide with phosphorothioate linkage
  modified_base 14: mod_base = OTHER; note = beta-D-oxy locked nucleotide with phosphorothioate linkage
  modified_base 15: mod_base = OTHER; note = beta-D-oxy locked nucleotide with phosphorothioate linkage
ctttaccattcgcaa

SEQ ID NO: 510 - DNA, 19 bp, synthetic construct
  source 1..19: mol_type = other DNA
  modified_base 1: mod_base = OTHER; note = 5-methyl beta-D-oxy locked nucleotide with phosphorothioate linkage
  modified_base 2: mod_base = OTHER; note = beta-D-oxy locked nucleotide with phosphorothioate linkage
  modified_base 3: mod_base = OTHER; note = 5-methyl beta-D-oxy locked nucleotide with phosphorothioate linkage
  modified_base 4: mod_base = OTHER; note = Nucleotide with phosphorothioate linkage
  modified_base 5: mod_base = OTHER; note = Nucleotide with phosphorothioate linkage
  modified_base 6: mod_base = OTHER; note = Nucleotide with phosphorothioate linkage
  modified_base 7: mod_base = OTHER; note = Nucleotide with phosphorothioate linkage
  modified_base 8: mod_base = OTHER; note = Nucleotide with phosphorothioate linkage
  modified_base 9: mod_base = OTHER; note = Nucleotide with phosphorothioate linkage
  modified_base 10: mod_base = OTHER; note = Nucleotide with phosphorothioate linkage
  modified_base 11: mod_base = OTHER; note = Nucleotide with phosphorothioate linkage
  modified_base 12: mod_base = OTHER; note = Nucleotide with phosphorothioate linkage
  modified_base 13: mod_base = OTHER; note = Nucleotide with phosphorothioate linkage
  modified_base 14: mod_base = OTHER; note = Nucleotide with phosphorothioate linkage
  modified_base 15: mod_base = OTHER; note = Nucleotide with phosphorothioate linkage
  modified_base 16: mod_base = OTHER; note = Nucleotide with phosphorothioate linkage
  modified_base 17: mod_base = OTHER; note = Nucleotide with phosphorothioate linkage
  modified_base 18: mod_base = OTHER; note = beta-D-oxy locked nucleotide with phosphorothioate linkage
  modified_base 19: mod_base = OTHER; note = 5-methyl beta-D-oxy locked nucleotide with phosphorothioate linkage
ctcttcaactttaccattc

SEQ ID NO: 511 - DNA, 19 bp, synthetic construct
  source 1..19: mol_type = other DNA
  modified_base 1: mod_base = OTHER; note = beta-D-oxy locked nucleotide with phosphorothioate linkage
  modified_base 2: mod_base = OTHER; note = 5-methyl beta-D-oxy locked nucleotide with phosphorothioate linkage
  modified_base 3: mod_base = OTHER; note = Nucleotide with phosphorothioate linkage
  modified_base 4: mod_base = OTHER; note = Nucleotide with phosphorothioate linkage
  modified_base 5: mod_base = OTHER; note = Nucleotide with phosphorothioate linkage
  modified_base 6: mod_base = OTHER; note = Nucleotide with phosphorothioate linkage
  modified_base 7: mod_base = OTHER; note = Nucleotide with phosphorothioate linkage
  modified_base 8: mod_base = OTHER; note = Nucleotide with phosphorothioate linkage
  modified_base 9: mod_base = OTHER; note = Nucleotide with phosphorothioate linkage
  modified_base 10: mod_base = OTHER; note = Nucleotide with phosphorothioate linkage
  modified_base 11: mod_base = OTHER; note = Nucleotide with phosphorothioate linkage
  modified_base 12: mod_base = OTHER; note = Nucleotide with phosphorothioate linkage
  modified_base 13: mod_base = OTHER; note = Nucleotide with phosphorothioate linkage
  modified_base 14: mod_base = OTHER; note = Nucleotide with phosphorothioate linkage
  modified_base 15: mod_base = OTHER; note = Nucleotide with phosphorothioate linkage
  modified_base 16: mod_base = OTHER; note = Nucleotide with phosphorothioate linkage
  modified_base 17: mod_base = OTHER; note = Nucleotide with phosphorothioate linkage
  modified_base 18: mod_base = OTHER; note = beta-D-oxy locked nucleotide with phosphorothioate linkage
  modified_base 19: mod_base = OTHER; note = beta-D-oxy locked nucleotide with phosphorothioate linkage
gctcttcaactttaccatt

SEQ ID NO: 512 - DNA, 18 bp, synthetic construct
  source 1..18: mol_type = other DNA
  modified_base 1: mod_base = OTHER; note = 5-methyl beta-D-oxy locked nucleotide with phosphorothioate linkage
  modified_base 2: mod_base = OTHER; note = 5-methyl beta-D-oxy locked nucleotide with phosphorothioate linkage
  modified_base 3: mod_base = OTHER; note = Nucleotide with phosphorothioate linkage
  modified_base 4: mod_base = OTHER; note = Nucleotide with phosphorothioate linkage
  modified_base 5: mod_base = OTHER; note = Nucleotide with phosphorothioate linkage
  modified_base 6: mod_base = OTHER; note = Nucleotide with phosphorothioate linkage
  modified_base 7: mod_base = OTHER; note = Nucleotide with phosphorothioate linkage
  modified_base 8: mod_base = OTHER; note = Nucleotide with phosphorothioate linkage
  modified_base 9: mod_base = OTHER; note = Nucleotide with phosphorothioate linkage
  modified_base 10: mod_base = OTHER; note = Nucleotide with phosphorothioate linkage
  modified_base 11: mod_base = OTHER; note = Nucleotide with phosphorothioate linkage
  modified_base 12: mod_base = OTHER; note = Nucleotide with phosphorothioate linkage
  modified_base 13: mod_base = OTHER; note = Nucleotide with phosphorothioate linkage
  modified_base 14: mod_base = OTHER; note = Nucleotide with phosphorothioate linkage
  modified_base 15: mod_base = OTHER; note = Nucleotide with phosphorothioate linkage
  modified_base 16: mod_base = OTHER; note = Nucleotide with phosphorothioate linkage
  modified_base 17: mod_base = OTHER; note = 5-methyl beta-D-oxy locked nucleotide with phosphorothioate linkage
  modified_base 18: mod_base = OTHER; note = beta-D-oxy locked nucleotide with phosphorothioate linkage
ccaaacacactattctct

SEQ ID NO: 513 - DNA, 20 bp, synthetic construct
  source 1..20: mol_type = other DNA
  modified_base 1: mod_base = OTHER; note = beta-D-oxy locked nucleotide with phosphorothioate linkage
  modified_base 2: mod_base = OTHER; note = beta-D-oxy locked nucleotide with phosphorothioate linkage
  modified_base 3: mod_base = OTHER; note = 5-methyl beta-D-oxy locked nucleotide with phosphorothioate linkage
  modified_base 4: mod_base = OTHER; note = Nucleotide with phosphorothioate linkage
  modified_base 5: mod_base = OTHER; note = Nucleotide with phosphorothioate linkage
  modified_base 6: mod_base = OTHER; note = Nucleotide with phosphorothioate linkage
  modified_base 7: mod_base = OTHER; note = Nucleotide with phosphorothioate linkage
  modified_base 8: mod_base = OTHER; note = Nucleotide with phosphorothioate linkage
  modified_base 9: mod_base = OTHER; note = Nucleotide with phosphorothioate linkage
  modified_base 10: mod_base = OTHER; note = Nucleotide with phosphorothioate linkage
  modified_base 11: mod_base = OTHER; note = Nucleotide with phosphorothioate linkage
  modified_base 12: mod_base = OTHER; note = Nucleotide with phosphorothioate linkage
  modified_base 13: mod_base = OTHER; note = Nucleotide with phosphorothioate linkage
  modified_base 14: mod_base = OTHER; note = Nucleotide with phosphorothioate linkage
  modified_base 15: mod_base = OTHER; note = Nucleotide with phosphorothioate linkage
  modified_base 16: mod_base = OTHER; note = Nucleotide with phosphorothioate linkage
  modified_base 17: mod_base = OTHER; note = Nucleotide with phosphorothioate linkage
  modified_base 18: mod_base = OTHER; note = Nucleotide with phosphorothioate linkage
  modified_base 19: mod_base = OTHER; note = 5-methyl beta-D-oxy locked nucleotide with phosphorothioate linkage
  modified_base 20: mod_base = OTHER; note = beta-D-oxy locked nucleotide with phosphorothioate linkage
taccaaacacactattctct

SEQ ID NO: 514 - DNA, 20 bp, synthetic construct
  source 1..20: mol_type = other DNA
  modified_base 1: mod_base = OTHER; note = beta-D-oxy locked nucleotide with phosphorothioate linkage
  modified_base 2: mod_base = OTHER; note = beta-D-oxy locked nucleotide with phosphorothioate linkage
  modified_base 3: mod_base = OTHER; note = Nucleotide with phosphorothioate linkage
  modified_base 4: mod_base = OTHER; note = Nucleotide with phosphorothioate linkage
  modified_base 5: mod_base = OTHER; note = Nucleotide with phosphorothioate linkage
  modified_base 6: mod_base = OTHER; note = Nucleotide with phosphorothioate linkage
  modified_base 7: mod_base = OTHER; note = Nucleotide with phosphorothioate linkage
  modified_base 8: mod_base = OTHER; note = Nucleotide with phosphorothioate linkage
  modified_base 9: mod_base = OTHER; note = Nucleotide with phosphorothioate linkage
  modified_base 10: mod_base = OTHER; note = Nucleotide with phosphorothioate linkage
  modified_base 11: mod_base = OTHER; note = Nucleotide with phosphorothioate linkage
  modified_base 12: mod_base = OTHER; note = Nucleotide with phosphorothioate linkage
  modified_base 13: mod_base = OTHER; note = Nucleotide with phosphorothioate linkage
  modified_base 14: mod_base = OTHER; note = Nucleotide with phosphorothioate linkage
  modified_base 15: mod_base = OTHER; note = Nucleotide with phosphorothioate linkage
  modified_base 16: mod_base = OTHER; note = Nucleotide with phosphorothioate linkage
  modified_base 17: mod_base = OTHER; note = Nucleotide with phosphorothioate linkage
  modified_base 18: mod_base = OTHER; note = Nucleotide with phosphorothioate linkage
  modified_base 19: mod_base = OTHER; note = beta-D-oxy locked nucleotide with phosphorothioate linkage
  modified_base 20: mod_base = OTHER; note = 5-methyl beta-D-oxy locked nucleotide with phosphorothioate linkage
gtaccaaacacactattctc

SEQ ID NO: 515 - DNA, 18 bp, synthetic construct
  source 1..18: mol_type = other DNA
  modified_base 1: mod_base = OTHER; note = beta-D-oxy locked nucleotide with phosphorothioate linkage
  modified_base 2: mod_base = OTHER; note = 5-methyl beta-D-oxy locked nucleotide with phosphorothioate linkage
  modified_base 3: mod_base = OTHER; note = Nucleotide with phosphorothioate linkage
  modified_base 4: mod_base = OTHER; note = Nucleotide with phosphorothioate linkage
  modified_base 5: mod_base = OTHER; note = Nucleotide with phosphorothioate linkage
  modified_base 6: mod_base = OTHER; note = Nucleotide with phosphorothioate linkage
  modified_base 7: mod_base = OTHER; note = Nucleotide with phosphorothioate linkage
  modified_base 8: mod_base = OTHER; note = Nucleotide with phosphorothioate linkage
  modified_base 9: mod_base = OTHER; note = Nucleotide with phosphorothioate linkage
  modified_base 10: mod_base = OTHER; note = Nucleotide with phosphorothioate linkage
  modified_base 11: mod_base = OTHER; note = Nucleotide with phosphorothioate linkage
  modified_base 12: mod_base = OTHER; note = Nucleotide with phosphorothioate linkage
  modified_base 13: mod_base = OTHER; note = Nucleotide with phosphorothioate linkage
  modified_base 14: mod_base = OTHER; note = Nucleotide with phosphorothioate linkage
  modified_base 15: mod_base = OTHER; note = Nucleotide with phosphorothioate linkage
  modified_base 16: mod_base = OTHER; note = 5-methyl beta-D-oxy locked nucleotide with phosphorothioate linkage
  modified_base 17: mod_base = OTHER; note = beta-D-oxy locked nucleotide with phosphorothioate linkage
  modified_base 18: mod_base = OTHER; note = beta-D-oxy locked nucleotide with phosphorothioate linkage
acagtaccaaacacacta

SEQ ID NO: 516 - DNA, 17 bp, synthetic construct
  source 1..17: mol_type = other DNA
  modified_base 1: mod_base = OTHER; note = beta-D-oxy locked nucleotide with phosphorothioate linkage
  modified_base 2: mod_base = OTHER; note = 5-methyl beta-D-oxy locked nucleotide with phosphorothioate linkage
  modified_base 3: mod_base = OTHER; note = beta-D-oxy locked nucleotide with phosphorothioate linkage
  modified_base 4: mod_base = OTHER; note = Nucleotide with phosphorothioate linkage
  modified_base 5: mod_base = OTHER; note = Nucleotide with phosphorothioate linkage
  modified_base 6: mod_base = OTHER; note = Nucleotide with phosphorothioate linkage
  modified_base 7: mod_base = OTHER; note = Nucleotide with phosphorothioate linkage
  modified_base 8: mod_base = OTHER; note = Nucleotide with phosphorothioate linkage
  modified_base 9: mod_base = OTHER; note = Nucleotide with phosphorothioate linkage
  modified_base 10: mod_base = OTHER; note = Nucleotide with phosphorothioate linkage
  modified_base 11: mod_base = OTHER; note = Nucleotide with phosphorothioate linkage
  modified_base 12: mod_base = OTHER; note = Nucleotide with phosphorothioate linkage
  modified_base 13: mod_base = OTHER; note = Nucleotide with phosphorothioate linkage
  modified_base 14: mod_base = OTHER; note = 5-methyl beta-D-oxy locked nucleotide with phosphorothioate linkage
  modified_base 15: mod_base = OTHER; note = beta-D-oxy locked nucleotide with phosphorothioate linkage
  modified_base 16: mod_base = OTHER; note = 5-methyl beta-D-oxy locked nucleotide with phosphorothioate linkage
  modified_base 17: mod_base = OTHER; note = beta-D-oxy locked nucleotide with phosphorothioate linkage
acagtaccaaacacact

SEQ ID NO: 517 - DNA, 16 bp, synthetic construct
  source 1..16: mol_type = other DNA
  modified_base 1: mod_base = OTHER; note = beta-D-oxy locked nucleotide with phosphorothioate linkage
  modified_base 2: mod_base = OTHER; note = beta-D-oxy locked nucleotide with phosphorothioate linkage
  modified_base 3: mod_base = OTHER; note = beta-D-oxy locked nucleotide with phosphorothioate linkage
  modified_base 4: mod_base = OTHER; note = beta-D-oxy locked nucleotide with phosphorothioate linkage
  modified_base 5: mod_base = OTHER; note = Nucleotide with phosphorothioate linkage
  modified_base 6: mod_base = OTHER; note = Nucleotide with phosphorothioate linkage
  modified_base 7: mod_base = OTHER; note = Nucleotide with phosphorothioate linkage
  modified_base 8: mod_base = OTHER; note = Nucleotide with phosphorothioate linkage
  modified_base 9: mod_base = OTHER; note = Nucleotide with phosphorothioate linkage
  modified_base 10: mod_base = OTHER; note = Nucleotide with phosphorothioate linkage
  modified_base 11: mod_base = OTHER; note = Nucleotide with phosphorothioate linkage
  modified_base 12: mod_base = OTHER; note = Nucleotide with phosphorothioate linkage
  modified_base 13: mod_base = OTHER; note = Nucleotide with phosphorothioate linkage
  modified_base 14: mod_base = OTHER; note = 5-methyl beta-D-oxy locked nucleotide with phosphorothioate linkage
  modified_base 15: mod_base = OTHER; note = beta-D-oxy locked nucleotide with phosphorothioate linkage
  modified_base 16: mod_base = OTHER; note = 5-methyl beta-D-oxy locked nucleotide with phosphorothioate linkage
taatatggctcttcac

SEQ ID NO: 518 - DNA, 19 bp, synthetic construct
  source 1..19: mol_type = other DNA
  modified_base 1: mod_base = OTHER; note = beta-D-oxy locked nucleotide with phosphorothioate linkage
  modified_base 2: mod_base = OTHER; note = beta-D-oxy locked nucleotide with phosphorothioate linkage
  modified_base 3: mod_base = OTHER; note = Nucleotide with phosphorothioate linkage
  modified_base 4: mod_base = OTHER; note = Nucleotide with phosphorothioate linkage
  modified_base 5: mod_base = OTHER; note = Nucleotide with phosphorothioate linkage
  modified_base 6: mod_base = OTHER; note = Nucleotide with phosphorothioate linkage
  modified_base 7: mod_base = OTHER; note = Nucleotide with phosphorothioate linkage
  modified_base 8: mod_base = OTHER; note = Nucleotide with phosphorothioate linkage
  modified_base 9: mod_base = OTHER; note = Nucleotide with phosphorothioate linkage
  modified_base 10: mod_base = OTHER; note = Nucleotide with phosphorothioate linkage
  modified_base 11: mod_base = OTHER; note = Nucleotide with phosphorothioate linkage
  modified_base 12: mod_base = OTHER; note = Nucleotide with phosphorothioate linkage
  modified_base 13: mod_base = OTHER; note = Nucleotide with phosphorothioate linkage
  modified_base 14: mod_base = OTHER; note = Nucleotide with phosphorothioate linkage
  modified_base 15: mod_base = OTHER; note = Nucleotide with phosphorothioate linkage
  modified_base 16: mod_base = OTHER; note = Nucleotide with phosphorothioate linkage
  modified_base 17: mod_base = OTHER; note = Nucleotide with phosphorothioate linkage
  modified_base 18: mod_base = OTHER; note = beta-D-oxy locked nucleotide with phosphorothioate linkage
  modified_base 19: mod_base = OTHER; note = beta-D-oxy locked nucleotide with phosphorothioate linkage
aagaacctaccaccttctt

SEQ ID NO: 519 - DNA, 16 bp, synthetic construct
  source 1..16: mol_type = other DNA
  modified_base 1: mod_base = OTHER; note = beta-D-oxy locked nucleotide with phosphorothioate linkage
  modified_base 2: mod_base = OTHER; note = beta-D-oxy locked nucleotide with phosphorothioate linkage
  modified_base 3: mod_base = OTHER; note = Nucleotide with phosphorothioate linkage
  modified_base 4: mod_base = OTHER; note = Nucleotide with phosphorothioate linkage
  modified_base 5: mod_base = OTHER; note = Nucleotide with phosphorothioate linkage
  modified_base 6: mod_base = OTHER; note = Nucleotide with phosphorothioate linkage
  modified_base 7: mod_base = OTHER; note = Nucleotide with phosphorothioate linkage
  modified_base 8: mod_base = OTHER; note = Nucleotide with phosphorothioate linkage
  modified_base 9: mod_base = OTHER; note = Nucleotide with phosphorothioate linkage
  modified_base 10: mod_base = OTHER; note = Nucleotide with phosphorothioate linkage
  modified_base 11: mod_base = OTHER; note = Nucleotide with phosphorothioate linkage
  modified_base 12: mod_base = OTHER; note = Nucleotide with phosphorothioate linkage
  modified_base 13: mod_base = OTHER; note = Nucleotide with phosphorothioate linkage
  modified_base 14: mod_base = OTHER; note = Nucleotide with phosphorothioate linkage
  modified_base 15: mod_base = OTHER; note = 5-methyl beta-D-oxy locked nucleotide with phosphorothioate linkage
  modified_base 16: mod_base = OTHER; note = beta-D-oxy locked nucleotide with phosphorothioate linkage
gaacctaccaccttct

SEQ ID NO: 520 - DNA, 18 bp, synthetic construct
  source 1..18: mol_type = other DNA
  modified_base 1: mod_base = OTHER; note = beta-D-oxy locked nucleotide with phosphorothioate linkage
  modified_base 2: mod_base = OTHER; note = beta-D-oxy locked nucleotide with phosphorothioate linkage
  modified_base 3: mod_base = OTHER; note = Nucleotide with phosphorothioate linkage
  modified_base 4: mod_base = OTHER; note = Nucleotide with phosphorothioate linkage
  modified_base 5: mod_base = OTHER; note = Nucleotide with phosphorothioate linkage
  modified_base 6: mod_base = OTHER; note = Nucleotide with phosphorothioate linkage
  modified_base 7: mod_base = OTHER; note = Nucleotide with phosphorothioate linkage
  modified_base 8: mod_base = OTHER; note = Nucleotide with phosphorothioate linkage
  modified_base 9: mod_base = OTHER; note = Nucleotide with phosphorothioate linkage
  modified_base 10: mod_base = OTHER; note = Nucleotide with phosphorothioate linkage
  modified_base 11: mod_base = OTHER; note = Nucleotide with phosphorothioate linkage
  modified_base 12: mod_base = OTHER; note = Nucleotide with phosphorothioate linkage
  modified_base 13: mod_base = OTHER; note = Nucleotide with phosphorothioate linkage
  modified_base 14: mod_base = OTHER; note = Nucleotide with phosphorothioate linkage
  modified_base 15: mod_base = OTHER; note = Nucleotide with phosphorothioate linkage
  modified_base 16: mod_base = OTHER; note = Nucleotide with phosphorothioate linkage
  modified_base 17: mod_base = OTHER; note = 5-methyl beta-D-oxy locked nucleotide with phosphorothioate linkage
  modified_base 18: mod_base = OTHER; note = beta-D-oxy locked nucleotide with phosphorothioate linkage
aagaacctaccaccttct

SEQ ID NO: 521 - DNA, 18 bp, synthetic construct
  source 1..18: mol_type = other DNA
  modified_base 1: mod_base = OTHER; note = beta-D-oxy locked nucleotide with phosphorothioate linkage
  modified_base 2: mod_base = OTHER; note = beta-D-oxy locked nucleotide with phosphorothioate linkage
  modified_base 3: mod_base = OTHER; note = Nucleotide with phosphorothioate linkage
  modified_base 4: mod_base = OTHER; note = Nucleotide with phosphorothioate linkage
  modified_base 5: mod_base = OTHER; note = Nucleotide with phosphorothioate linkage
  modified_base 6: mod_base = OTHER; note = Nucleotide with phosphorothioate linkage
  modified_base 7: mod_base = OTHER; note = Nucleotide with phosphorothioate linkage
  modified_base 8: mod_base = OTHER; note = Nucleotide with phosphorothioate linkage
  modified_base 9: mod_base = OTHER; note = Nucleotide with phosphorothioate linkage
  modified_base 10: mod_base = OTHER; note = Nucleotide with phosphorothioate linkage
  modified_base 11: mod_base = OTHER; note = Nucleotide with phosphorothioate linkage
  modified_base 12: mod_base = OTHER; note = Nucleotide with phosphorothioate linkage
  modified_base 13: mod_base = OTHER; note = Nucleotide with phosphorothioate linkage
  modified_base 14: mod_base = OTHER; note = Nucleotide with phosphorothioate linkage
  modified_base 15: mod_base = OTHER; note = Nucleotide with phosphorothioate linkage
  modified_base 16: mod_base = OTHER; note = Nucleotide with phosphorothioate linkage
  modified_base 17: mod_base = OTHER; note = beta-D-oxy locked nucleotide with phosphorothioate linkage
  modified_base 18: mod_base = OTHER; note = 5-methyl beta-D-oxy locked nucleotide with phosphorothioate linkage
agtaaccacctccaaatc

SEQ ID NO: 522 - DNA, 17 bp, synthetic construct
  source 1..17: mol_type = other DNA
  modified_base 1: mod_base = OTHER; note = 5-methyl beta-D-oxy locked nucleotide with phosphorothioate linkage
  modified_base 2: mod_base = OTHER; note = beta-D-oxy locked nucleotide with phosphorothioate linkage
  modified_base 3: mod_base = OTHER; note = Nucleotide with phosphorothioate linkage
  modified_base 4: mod_base = OTHER; note = Nucleotide with phosphorothioate linkage
  modified_base 5: mod_base = OTHER; note = Nucleotide with phosphorothioate linkage
  modified_base 6: mod_base = OTHER; note = Nucleotide with phosphorothioate linkage
  modified_base 7: mod_base = OTHER; note = Nucleotide with phosphorothioate linkage
  modified_base 8: mod_base = OTHER; note = Nucleotide with phosphorothioate linkage
  modified_base 9: mod_base = OTHER; note = Nucleotide with phosphorothioate linkage
  modified_base 10: mod_base = OTHER; note = Nucleotide with phosphorothioate linkage
  modified_base 11: mod_base = OTHER; note = Nucleotide with phosphorothioate linkage
  modified_base 12: mod_base = OTHER; note = Nucleotide with phosphorothioate linkage
  modified_base 13: mod_base = OTHER; note = Nucleotide with phosphorothioate linkage
  modified_base 14: mod_base = OTHER; note = 5-methyl beta-D-oxy locked nucleotide with phosphorothioate linkage
  modified_base 15: mod_base = OTHER; note = beta-D-oxy locked nucleotide with phosphorothioate linkage
  modified_base 16: mod_base = OTHER; note = beta-D-oxy locked nucleotide with phosphorothioate linkage
  modified_base 17: mod_base = OTHER; note = beta-D-oxy locked nucleotide with phosphorothioate linkage
cagtaaccacctccaaa

SEQ ID NO: 523 - DNA, 16 bp, synthetic construct
  source 1..16: mol_type = other DNA
  modified_base 1: mod_base = OTHER; note = 5-methyl beta-D-oxy locked nucleotide with phosphorothioate linkage
  modified_base 2: mod_base = OTHER; note = beta-D-oxy locked nucleotide with phosphorothioate linkage
  modified_base 3: mod_base = OTHER; note = beta-D-oxy locked nucleotide with phosphorothioate linkage
  modified_base 4: mod_base = OTHER; note = Nucleotide with phosphorothioate linkage
  modified_base 5: mod_base = OTHER; note = Nucleotide with phosphorothioate linkage
  modified_base 6: mod_base = OTHER; note = Nucleotide with phosphorothioate linkage
  modified_base 7: mod_base = OTHER; note = Nucleotide with phosphorothioate linkage
  modified_base 8: mod_base = OTHER; note = Nucleotide with phosphorothioate linkage
  modified_base 9: mod_base = OTHER; note = Nucleotide with phosphorothioate linkage
  modified_base 10: mod_base = OTHER; note = Nucleotide with phosphorothioate linkage
  modified_base 11: mod_base = OTHER; note = Nucleotide with phosphorothioate linkage
  modified_base 12: mod_base = OTHER; note = Nucleotide with phosphorothioate linkage
  modified_base 13: mod_base = OTHER; note = Nucleotide with phosphorothioate linkage
  modified_base 14: mod_base = OTHER; note = Nucleotide with phosphorothioate linkage
  modified_base 15: mod_base = OTHER; note = beta-D-oxy locked nucleotide with phosphorothioate linkage
  modified_base 16: mod_base = OTHER; note = beta-D-oxy locked nucleotide with phosphorothioate linkage
cagtaaccacctccaa

SEQ ID NO: 524 - DNA, 17 bp, synthetic construct
  source 1..17: mol_type = other DNA
  modified_base 1: mod_base = OTHER; note = beta-D-oxy locked nucleotide with phosphorothioate linkage
  modified_base 2: mod_base = OTHER; note = beta-D-oxy locked nucleotide with phosphorothioate linkage
  modified_base 3: mod_base = OTHER; note = beta-D-oxy locked nucleotide with phosphorothioate linkage
  modified_base 4: mod_base = OTHER; note = Nucleotide with phosphorothioate linkage
  modified_base 5: mod_base = OTHER; note = Nucleotide with phosphorothioate linkage
  modified_base 6: mod_base = OTHER; note = Nucleotide with phosphorothioate linkage
  modified_base 7: mod_base = OTHER; note = Nucleotide with phosphorothioate linkage
  modified_base 8: mod_base = OTHER; note = Nucleotide with phosphorothioate linkage
  modified_base 9: mod_base = OTHER; note = Nucleotide with phosphorothioate linkage
  modified_base 10: mod_base = OTHER; note = Nucleotide with phosphorothioate linkage
  modified_base 11: mod_base = OTHER; note = Nucleotide with phosphorothioate linkage
  modified_base 12: mod_base = OTHER; note = Nucleotide with phosphorothioate linkage
  modified_base 13: mod_base = OTHER; note = Nucleotide with phosphorothioate linkage
  modified_base 14: mod_base = OTHER; note = 5-methyl beta-D-oxy locked nucleotide with phosphorothioate linkage
  modified_base 15: mod_base = OTHER; note = beta-D-oxy locked nucleotide with phosphorothioate linkage
  modified_base 16: mod_base = OTHER; note = 5-methyl beta-D-oxy locked nucleotide with phosphorothioate linkage
  modified_base 17: mod_base = OTHER; note = beta-D-oxy locked nucleotide with phosphorothioate linkage
atgacaatatcttctct

SEQ ID NO: 525 - DNA, 17 bp, synthetic construct
  source 1..17: mol_type = other DNA
  modified_base 1: mod_base = OTHER; note = 5-methyl beta-D-oxy locked nucleotide with phosphorothioate linkage
  modified_base 2: mod_base = OTHER; note = beta-D-oxy locked nucleotide with phosphorothioate linkage
  modified_base 3: mod_base = OTHER; note = beta-D-oxy locked nucleotide with phosphorothioate linkage
  modified_base 4: mod_base = OTHER; note = 5-methyl beta-D-oxy locked nucleotide with phosphorothioate linkage
  modified_base 5: mod_base = OTHER; note = Nucleotide with phosphorothioate linkage
  modified_base 6: mod_base = OTHER; note = Nucleotide with phosphorothioate linkage
  modified_base 7: mod_base = OTHER; note = Nucleotide with phosphorothioate linkage
  modified_base 8: mod_base = OTHER; note = Nucleotide with phosphorothioate linkage
  modified_base 9: mod_base = OTHER; note = Nucleotide with phosphorothioate linkage
  modified_base 10: mod_base = OTHER; note = Nucleotide with phosphorothioate linkage
  modified_base 11: mod_base = OTHER; note = Nucleotide with phosphorothioate linkage
  modified_base 12: mod_base = OTHER; note = Nucleotide with phosphorothioate linkage
  modified_base 13: mod_base = OTHER; note = Nucleotide with phosphorothioate linkage
  modified_base 14: mod_base = OTHER; note = Nucleotide with phosphorothioate linkage
  modified_base 15: mod_base = OTHER; note = Nucleotide with phosphorothioate linkage
  modified_base 16: mod_base = OTHER; note = 5-methyl beta-D-oxy locked nucleotide with phosphorothioate linkage
  modified_base 17: mod_base = OTHER; note = beta-D-oxy locked nucleotide with phosphorothioate linkage
catcccacaagacaact

SEQ ID NO: 526 - DNA, 16 bp, synthetic construct
  source 1..16: mol_type = other DNA
  modified_base 1: mod_base = OTHER; note = beta-D-oxy locked nucleotide with phosphorothioate linkage
  modified_base 2: mod_base = OTHER; note = beta-D-oxy locked nucleotide with phosphorothioate linkage
  modified_base 3: mod_base = OTHER; note = 5-methyl beta-D-oxy locked nucleotide with phosphorothioate linkage
  modified_base 4: mod_base = OTHER; note = Nucleotide with phosphorothioate linkage
  modified_base 5: mod_base = OTHER; note = Nucleotide with phosphorothioate linkage
  modified_base 6: mod_base = OTHER; note = Nucleotide with phosphorothioate linkage
  modified_base 7: mod_base = OTHER; note = Nucleotide with phosphorothioate linkage
  modified_base 8: mod_base = OTHER; note = Nucleotide with phosphorothioate linkage
  modified_base 9: mod_base = OTHER; note = Nucleotide with phosphorothioate linkage
  modified_base 10: mod_base = OTHER; note = Nucleotide with phosphorothioate linkage
  modified_base 11: mod_base = OTHER; note = Nucleotide with phosphorothioate linkage
  modified_base 12: mod_base = OTHER; note = Nucleotide with phosphorothioate linkage
  modified_base 13: mod_base = OTHER; note = Nucleotide with phosphorothioate linkage
  modified_base 14: mod_base = OTHER; note = beta-D-oxy locked nucleotide with phosphorothioate linkage
  modified_base 15: mod_base = OTHER; note = 5-methyl beta-D-oxy locked nucleotide with phosphorothioate linkage
  modified_base 16: mod_base = OTHER; note = 5-methyl beta-D-oxy locked nucleotide with phosphorothioate linkage
atcctgagtacaaacc

SEQ ID NO: 527 - DNA, 16 bp, synthetic construct
  source 1..16: mol_type = other DNA
  modified_base 1: mod_base = OTHER; note = 5-methyl beta-D-oxy locked nucleotide with phosphorothioate linkage
  modified_base 2: mod_base = OTHER; note = beta-D-oxy locked nucleotide with phosphorothioate linkage
  modified_base 3: mod_base = OTHER; note = beta-D-oxy locked nucleotide with phosphorothioate linkage
  modified_base 4: mod_base = OTHER; note = Nucleotide with phosphorothioate linkage
  modified_base 5: mod_base = OTHER; note = Nucleotide with phosphorothioate linkage
  modified_base 6: mod_base = OTHER; note = Nucleotide with phosphorothioate linkage
  modified_base 7: mod_base = OTHER; note = Nucleotide with phosphorothioate linkage
  modified_base 8: mod_base = OTHER; note = Nucleotide with phosphorothioate linkage
  modified_base 9: mod_base = OTHER; note = Nucleotide with phosphorothioate linkage
  modified_base 10: mod_base = OTHER; note = Nucleotide with phosphorothioate linkage
  modified_base 11: mod_base = OTHER; note = Nucleotide with phosphorothioate linkage
  modified_base 12: mod_base = OTHER; note = Nucleotide with phosphorothioate linkage
  modified_base 13: mod_base = OTHER; note = Nucleotide with phosphorothioate linkage
  modified_base 14: mod_base = OTHER; note = 5-methyl beta-D-oxy locked nucleotide with phosphorothioate linkage
  modified_base 15: mod_base = OTHER; note = 5-methyl beta-D-oxy locked nucleotide with phosphorothioate linkage
  modified_base 16: mod_base = OTHER; note = beta-D-oxy locked nucleotide with phosphorothioate linkage
ctattaaggaactcct

SEQ ID NO: 528 - DNA, 17 bp, synthetic construct
  source 1..17: mol_type = other DNA
  modified_base 1: mod_base = OTHER; note = beta-D-oxy locked nucleotide with phosphorothioate linkage
  modified_base 2: mod_base = OTHER; note = beta-D-oxy locked nucleotide with phosphorothioate linkage
  modified_base 3: mod_base = OTHER; note = beta-D-oxy locked nucleotide with phosphorothioate linkage
  modified_base 4: mod_base = OTHER; note = beta-D-oxy locked nucleotide with phosphorothioate linkage
  modified_base 5: mod_base = OTHER; note = Nucleotide with phosphorothioate linkage
  modified_base 6: mod_base = OTHER; note = Nucleotide with phosphorothioate linkage
  modified_base 7: mod_base = OTHER; note = Nucleotide with phosphorothioate linkage
  modified_base 8: mod_base = OTHER; note = Nucleotide with phosphorothioate linkage
  modified_base 9: mod_base = OTHER; note = Nucleotide with phosphorothioate linkage
  modified_base 10: mod_base = OTHER; note = Nucleotide with phosphorothioate linkage
  modified_base 11: mod_base = OTHER; note = Nucleotide with phosphorothioate linkage
  modified_base 12: mod_base = OTHER; note = Nucleotide with phosphorothioate linkage
  modified_base 13: mod_base = OTHER; note = Nucleotide with phosphorothioate linkage
  modified_base 14: mod_base = OTHER; note = beta-D-oxy locked nucleotide with phosphorothioate linkage
  modified_base 15: mod_base = OTHER; note = beta-D-oxy locked nucleotide with phosphorothioate linkage
  modified_base 16: mod_base = OTHER; note = 5-methyl beta-D-oxy locked nucleotide with phosphorothioate linkage
  modified_base 17: mod_base = OTHER; note = beta-D-oxy locked nucleotide with phosphorothioate linkage
ataactacatgaaatca

SEQ ID NO: 529 - DNA, 18 bp, synthetic construct
  source 1..18: mol_type = other DNA
  modified_base 1: mod_base = OTHER; note = beta-D-oxy locked nucleotide with phosphorothioate linkage
  modified_base 2: mod_base = OTHER; note = beta-D-oxy locked nucleotide with phosphorothioate linkage
  modified_base 3: mod_base = OTHER; note = Nucleotide with phosphorothioate linkage
  modified_base 4: mod_base = OTHER; note = Nucleotide with phosphorothioate linkage
  modified_base 5: mod_base = OTHER; note = Nucleotide with phosphorothioate linkage
  modified_base 6: mod_base = OTHER; note = Nucleotide with phosphorothioate linkage
  modified_base 7: mod_base = OTHER; note = Nucleotide with phosphorothioate linkage
  modified_base 8: mod_base = OTHER; note = Nucleotide with phosphorothioate linkage
  modified_base 9: mod_base = OTHER; note = Nucleotide with phosphorothioate linkage
  modified_base 10: mod_base = OTHER; note = Nucleotide with phosphorothioate linkage
  modified_base 11: mod_base = OTHER; note = Nucleotide with phosphorothioate linkage
  modified_base 12: mod_base = OTHER; note = Nucleotide with phosphorothioate linkage
  modified_base 13: mod_base = OTHER; note = Nucleotide with phosphorothioate linkage
  modified_base 14: mod_base = OTHER; note = Nucleotide with phosphorothioate linkage
  modified_base 15: mod_base = OTHER; note = Nucleotide with phosphorothioate linkage
  modified_base 16: mod_base = OTHER; note = 5-methyl beta-D-oxy locked nucleotide with phosphorothioate linkage
  modified_base 17: mod_base = OTHER; note = beta-D-oxy locked nucleotide with phosphorothioate linkage
  modified_base 18: mod_base = OTHER; note = 5-methyl beta-D-oxy locked nucleotide with phosphorothioate linkage
attacaaacctccaccac

SEQ ID NO: 530 - DNA, 17 bp, synthetic construct
  source 1..17: mol_type = other DNA
  modified_base 1: mod_base = OTHER; note = beta-D-oxy locked nucleotide with phosphorothioate linkage
  modified_base 2: mod_base = OTHER; note = beta-D-oxy locked nucleotide with phosphorothioate linkage
  modified_base 3: mod_base = OTHER; note = beta-D-oxy locked nucleotide with phosphorothioate linkage
  modified_base 4: mod_base = OTHER; note = Nucleotide with phosphorothioate linkage
  modified_base 5: mod_base = OTHER; note = Nucleotide with phosphorothioate linkage
  modified_base 6: mod_base = OTHER; note = Nucleotide with phosphorothioate linkage
  modified_base 7: mod_base = OTHER; note = Nucleotide with phosphorothioate linkage
  modified_base 8: mod_base = OTHER; note = Nucleotide with phosphorothioate linkage
  modified_base 9: mod_base = OTHER; note = Nucleotide with phosphorothioate linkage
  modified_base 10: mod_base = OTHER; note = Nucleotide with phosphorothioate linkage
  modified_base 11: mod_base = OTHER; note = Nucleotide with phosphorothioate linkage
  modified_base 12: mod_base = OTHER; note = Nucleotide with phosphorothioate linkage
  modified_base 13: mod_base = OTHER; note = Nucleotide with phosphorothioate linkage
  modified_base 14: mod_base = OTHER; note = Nucleotide with phosphorothioate linkage
  modified_base 15: mod_base = OTHER; note = Nucleotide with phosphorothioate linkage
  modified_base 16: mod_base = OTHER; note = 5-methyl beta-D-oxy locked nucleotide with phosphorothioate linkage
  modified_base 17: mod_base = OTHER; note = 5-methyl beta-D-oxy locked nucleotide with phosphorothioate linkage
gattacaaacctccacc

SEQ ID NO: 531 - DNA, 16 bp, synthetic construct
  source 1..16: mol_type = other DNA
  modified_base 1: mod_base = OTHER; note = beta-D-oxy locked nucleotide with phosphorothioate linkage
  modified_base 2: mod_base = OTHER; note = beta-D-oxy locked nucleotide with phosphorothioate linkage
  modified_base 3: mod_base = OTHER; note = Nucleotide with phosphorothioate linkage
  modified_base 4: mod_base = OTHER; note = Nucleotide with phosphorothioate linkage
  modified_base 5: mod_base = OTHER; note = Nucleotide with phosphorothioate linkage
  modified_base 6: mod_base = OTHER; note = Nucleotide with phosphorothioate linkage
  modified_base 7: mod_base = OTHER; note = Nucleotide with phosphorothioate linkage
  modified_base 8: mod_base = OTHER; note = Nucleotide with phosphorothioate linkage
  modified_base 9: mod_base = OTHER; note = Nucleotide with phosphorothioate linkage
  modified_base 10: mod_base = OTHER; note = Nucleotide with phosphorothioate linkage
  modified_base 11: mod_base = OTHER; note = Nucleotide with phosphorothioate linkage
  modified_base 12: mod_base = OTHER; note = Nucleotide with phosphorothioate linkage
  modified_base 13: mod_base = OTHER; note = Nucleotide with phosphorothioate linkage
  modified_base 14: mod_base = OTHER; note = Nucleotide with phosphorothioate linkage
  modified_base 15: mod_base = OTHER; note = 5-methyl beta-D-oxy locked nucleotide with phosphorothioate linkage
  modified_base 16: mod_base = OTHER; note = 5-methyl beta-D-oxy locked nucleotide with phosphorothioate linkage
aggattacaaacctcc

SEQ ID NO: 532 - DNA, 21 bp, synthetic construct
  source 1..21: mol_type = other DNA
  modified_base 1: mod_base = OTHER; note = beta-D-oxy locked nucleotide with phosphorothioate linkage
  modified_base 2: mod_base = OTHER; note = beta-D-oxy locked nucleotide with phosphorothioate linkage
  modified_base 3: mod_base = OTHER; note = Nucleotide with phosphorothioate linkage
  modified_base 4: mod_base = OTHER; note = Nucleotide with phosphorothioate linkage
  modified_base 5: mod_base = OTHER; note = Nucleotide with phosphorothioate linkage
  modified_base 6: mod_base = OTHER; note = Nucleotide with phosphorothioate linkage
  modified_base 7: mod_base = OTHER; note = Nucleotide with phosphorothioate linkage
  modified_base 8: mod_base = OTHER; note = Nucleotide with phosphorothioate linkage
  modified_base 9: mod_base = OTHER; note = Nucleotide with phosphorothioate linkage
  modified_base 10: mod_base = OTHER; note = Nucleotide with phosphorothioate linkage
  modified_base 11: mod_base = OTHER; note = Nucleotide with phosphorothioate linkage
  modified_base 12: mod_base = OTHER; note = Nucleotide with phosphorothioate linkage
  modified_base 13: mod_base = OTHER; note = Nucleotide with phosphorothioate linkage
  modified_base 14: mod_base = OTHER; note = Nucleotide with phosphorothioate linkage
  modified_base 15: mod_base = OTHER; note = Nucleotide with phosphorothioate linkage
  modified_base 16: mod_base = OTHER; note = Nucleotide with phosphorothioate linkage
  modified_base 17: mod_base = OTHER; note = Nucleotide with phosphorothioate linkage
  modified_base 18: mod_base = OTHER; note = Nucleotide with phosphorothioate linkage
  modified_base 19: mod_base = OTHER; note = Nucleotide with phosphorothioate linkage
  modified_base 20: mod_base = OTHER; note = beta-D-oxy locked nucleotide with phosphorothioate linkage
  modified_base 21: mod_base = OTHER; note = beta-D-oxy locked nucleotide with phosphorothioate linkage
aacaattcctaccctatcttt

SEQ ID NO: 533 - DNA, 20 bp, synthetic construct
  source 1..20: mol_type = other DNA
  modified_base 1: mod_base = OTHER; note = beta-D-oxy locked nucleotide with phosphorothioate linkage
  modified_base 2: mod_base = OTHER; note = beta-D-oxy locked nucleotide with phosphorothioate linkage
  modified_base 3: mod_base = OTHER; note = Nucleotide with phosphorothioate linkage
  modified_base 4: mod_base = OTHER; note = Nucleotide with phosphorothioate linkage
  modified_base 5: mod_base = OTHER; note = Nucleotide with phosphorothioate linkage
  modified_base 6: mod_base = OTHER; note = Nucleotide with phosphorothioate linkage
  modified_base 7: mod_base = OTHER; note = Nucleotide with phosphorothioate linkage
  modified_base 8: mod_base = OTHER; note = Nucleotide with phosphorothioate linkage
  modified_base 9: mod_base = OTHER; note = Nucleotide with phosphorothioate linkage
  modified_base 10: mod_base = OTHER; note = Nucleotide with phosphorothioate linkage
  modified_base 11: mod_base = OTHER; note = Nucleotide with phosphorothioate linkage
  modified_base 12: mod_base = OTHER; note = Nucleotide with phosphorothioate linkage
  modified_base 13: mod_base = OTHER; note = Nucleotide with phosphorothioate linkage
  modified_base 14: mod_base = OTHER; note = Nucleotide with phosphorothioate linkage
  modified_base 15: mod_base = OTHER; note = Nucleotide with phosphorothioate linkage
  modified_base 16: mod_base = OTHER; note = Nucleotide with phosphorothioate linkage
  modified_base 17: mod_base = OTHER; note = Nucleotide with phosphorothioate linkage
  modified_base 18: mod_base = OTHER; note = Nucleotide with phosphorothioate linkage
  modified_base 19: mod_base = OTHER; note = beta-D-oxy locked nucleotide with phosphorothioate linkage
  modified_base 20: mod_base = OTHER; note = beta-D-oxy locked nucleotide with phosphorothioate linkage
aacaattcctaccctatctt

SEQ ID NO: 534 - DNA, 17 bp, synthetic construct
  source 1..17: mol_type = other DNA
  modified_base 1: mod_base = OTHER; note = beta-D-oxy locked nucleotide with phosphorothioate linkage
  modified_base 2: mod_base = OTHER; note = beta-D-oxy locked nucleotide with phosphorothioate linkage
  modified_base 3: mod_base = OTHER; note = 5-methyl beta-D-oxy locked nucleotide with phosphorothioate linkage
  modified_base 4: mod_base = OTHER; note = beta-D-oxy locked nucleotide with phosphorothioate linkage
  modified_base 5: mod_base = OTHER; note = Nucleotide with phosphorothioate linkage
  modified_base 6: mod_base = OTHER; note = Nucleotide with phosphorothioate linkage
  modified_base 7: mod_base = OTHER; note = Nucleotide with phosphorothioate linkage
  modified_base 8: mod_base = OTHER; note = Nucleotide with phosphorothioate linkage
  modified_base 9: mod_base = OTHER; note = Nucleotide with phosphorothioate linkage
  modified_base 10: mod_base = OTHER; note = Nucleotide with phosphorothioate linkage
  modified_base 11: mod_base = OTHER; note = Nucleotide with phosphorothioate linkage
  modified_base 12: mod_base = OTHER; note = Nucleotide with phosphorothioate linkage
  modified_base 13: mod_base = OTHER; note = Nucleotide with phosphorothioate linkage
  modified_base 14: mod_base = OTHER; note = Nucleotide with phosphorothioate linkage
  modified_base 15: mod_base = OTHER; note = Nucleotide with phosphorothioate linkage
  modified_base 16: mod_base = OTHER; note = 5-methyl beta-D-oxy locked nucleotide with phosphorothioate linkage
  modified_base 17: mod_base = OTHER; note = 5-methyl beta-D-oxy locked nucleotide with phosphorothioate linkage
ttcaacaattcctaccc

SEQ ID NO: 535 - DNA, 18 bp, synthetic construct
  source 1..18: mol_type = other DNA
  modified_base 1: mod_base = OTHER; note = 5-methyl beta-D-oxy locked nucleotide with phosphorothioate linkage
  modified_base 2: mod_base = OTHER; note = 5-methyl beta-D-oxy locked nucleotide with phosphorothioate linkage
  modified_base 3: mod_base = OTHER; note = Nucleotide with phosphorothioate linkage
  modified_base 4: mod_base = OTHER; note = Nucleotide with phosphorothioate linkage
  modified_base 5: mod_base = OTHER; note = Nucleotide with phosphorothioate linkage
  modified_base 6: mod_base = OTHER; note = Nucleotide with phosphorothioate linkage
  modified_base 7: mod_base = OTHER; note = Nucleotide with phosphorothioate linkage
  modified_base 8: mod_base = OTHER; note = Nucleotide with phosphorothioate linkage
  modified_base 9: mod_base = OTHER; note = Nucleotide with phosphorothioate linkage
  modified_base 10: mod_base = OTHER; note = Nucleotide with phosphorothioate linkage
  modified_base 11: mod_base = OTHER; note = Nucleotide with phosphorothioate linkage
  modified_base 12: mod_base = OTHER; note = Nucleotide with phosphorothioate linkage
  modified_base 13: mod_base = OTHER; note = Nucleotide with phosphorothioate linkage
  modified_base 14: mod_base = OTHER; note = Nucleotide with phosphorothioate linkage
  modified_base 15: mod_base = OTHER; note = Nucleotide with phosphorothioate linkage
  modified_base 16: mod_base = OTHER; note = Nucleotide with phosphorothioate linkage
  modified_base 17: mod_base = OTHER; note = 5-methyl beta-D-oxy locked nucleotide with phosphorothioate linkage
  modified_base 18: mod_base = OTHER; note = 5-methyl beta-D-oxy locked nucleotide with phosphorothioate linkage
ccttcaacaattcctacc

SEQ ID NO: 536 - DNA, 18 bp, synthetic construct
  source 1..18: mol_type = other DNA
  modified_base 1: mod_base = OTHER; note = beta-D-oxy locked nucleotide with phosphorothioate linkage
  modified_base 2: mod_base = OTHER; note = 5-methyl beta-D-oxy locked nucleotide with phosphorothioate linkage
  modified_base 3: mod_base = OTHER; note = Nucleotide with phosphorothioate linkage
  modified_base 4: mod_base = OTHER; note = Nucleotide with phosphorothioate linkage
  modified_base 5: mod_base = OTHER; note = Nucleotide with phosphorothioate linkage
  modified_base 6: mod_base = OTHER; note = Nucleotide with phosphorothioate linkage
  modified_base 7: mod_base = OTHER; note = Nucleotide with phosphorothioate linkage
  modified_base 8: mod_base = OTHER; note = Nucleotide with phosphorothioate linkage
  modified_base 9: mod_base = OTHER; note = Nucleotide with phosphorothioate linkage
  modified_base 10: mod_base = OTHER; note = Nucleotide with phosphorothioate linkage
  modified_base 11: mod_base = OTHER; note = Nucleotide with phosphorothioate linkage
  modified_base 12: mod_base = OTHER; note = Nucleotide with phosphorothioate linkage
  modified_base 13: mod_base = OTHER; note = Nucleotide with phosphorothioate linkage
  modified_base 14: mod_base = OTHER; note = Nucleotide with phosphorothioate linkage
  modified_base 15: mod_base = OTHER; note = Nucleotide with phosphorothioate linkage
  modified_base 16: mod_base = OTHER; note = Nucleotide with phosphorothioate linkage
  modified_base 17: mod_base = OTHER; note = beta-D-oxy locked nucleotide with phosphorothioate linkage
  modified_base 18: mod_base = OTHER; note = 5-methyl beta-D-oxy locked nucleotide with phosphorothioate linkage
gctcaccttcaacaattc

SEQ ID NO: 537 - DNA, 17 bp, synthetic construct
  source 1..17: mol_type = other DNA
  modified_base 1: mod_base = OTHER; note = beta-D-oxy locked nucleotide with phosphorothioate linkage
  modified_base 2: mod_base = OTHER; note = 5-methyl beta-D-oxy locked nucleotide with phosphorothioate linkage
  modified_base 3: mod_base = OTHER; note = Nucleotide with phosphorothioate linkage
  modified_base 4: mod_base = OTHER; note = Nucleotide with phosphorothioate linkage
  modified_base 5: mod_base = OTHER; note = Nucleotide with phosphorothioate linkage
  modified_base 6: mod_base = OTHER; note = Nucleotide with phosphorothioate linkage
  modified_base 7: mod_base = OTHER; note = Nucleotide with phosphorothioate linkage
  modified_base 8: mod_base = OTHER; note = Nucleotide with phosphorothioate linkage
  modified_base 9: mod_base = OTHER; note = Nucleotide with phosphorothioate linkage
  modified_base 10: mod_base = OTHER; note = Nucleotide with phosphorothioate linkage
  modified_base 11: mod_base = OTHER; note = Nucleotide with phosphorothioate linkage
  modified_base 12: mod_base = OTHER; note = Nucleotide with phosphorothioate linkage
  modified_base 13: mod_base = OTHER; note = Nucleotide with phosphorothioate linkage
  modified_base 14: mod_base = OTHER; note = Nucleotide with phosphorothioate linkage
  modified_base 15: mod_base = OTHER; note = Nucleotide with phosphorothioate linkage
  modified_base 16: mod_base = OTHER; note = beta-D-oxy locked nucleotide with phosphorothioate linkage
  modified_base 17: mod_base = OTHER; note = beta-D-oxy locked nucleotide with phosphorothioate linkage
gctcaccttcaacaatt

SEQ ID NO: 538 - DNA, 16 bp, synthetic construct
  source 1..16: mol_type = other DNA
  modified_base 1: mod_base = OTHER; note = beta-D-oxy locked nucleotide with phosphorothioate linkage
  modified_base 2: mod_base = OTHER; note = 5-methyl beta-D-oxy locked nucleotide with phosphorothioate linkage
  modified_base 3: mod_base = OTHER; note = Nucleotide with phosphorothioate linkage
  modified_base 4: mod_base = OTHER; note = Nucleotide with phosphorothioate linkage
  modified_base 5: mod_base = OTHER; note = Nucleotide with phosphorothioate linkage
  modified_base 6: mod_base = OTHER; note = Nucleotide with phosphorothioate linkage
  modified_base 7: mod_base = OTHER; note = Nucleotide with phosphorothioate linkage
  modified_base 8: mod_base = OTHER; note = Nucleotide with phosphorothioate linkage
  modified_base 9: mod_base = OTHER; note = Nucleotide with phosphorothioate linkage
  modified_base 10: mod_base = OTHER; note = Nucleotide with phosphorothioate linkage
  modified_base 11: mod_base = OTHER; note = Nucleotide with phosphorothioate linkage
  modified_base 12: mod_base = OTHER; note = Nucleotide with phosphorothioate linkage
  modified_base 13: mod_base = OTHER; note = Nucleotide with phosphorothioate linkage
  modified_base 14: mod_base = OTHER; note = Nucleotide with phosphorothioate linkage
  modified_base 15: mod_base = OTHER; note = beta-D-oxy locked nucleotide with phosphorothioate linkage
  modified_base 16: mod_base = OTHER; note = beta-D-oxy locked nucleotide with phosphorothioate linkage
gctcaccttcaacaat

SEQ ID NO: 539 - DNA, 17 bp, synthetic construct
  source 1..17: mol_type = other DNA
  modified_base 1: mod_base = OTHER; note = beta-D-oxy locked nucleotide with phosphorothioate linkage
  modified_base 2: mod_base = OTHER; note = 5-methyl beta-D-oxy locked nucleotide with phosphorothioate linkage
  modified_base 3: mod_base = OTHER; note = 5-methyl beta-D-oxy locked nucleotide with phosphorothioate linkage
  modified_base 4: mod_base = OTHER; note = beta-D-oxy locked nucleotide with phosphorothioate linkage
  modified_base 5: mod_base = OTHER; note = Nucleotide with phosphorothioate linkage
  modified_base 6: mod_base = OTHER; note = Nucleotide with phosphorothioate linkage
  modified_base 7: mod_base = OTHER; note = Nucleotide with phosphorothioate linkage
  modified_base 8: mod_base = OTHER; note = Nucleotide with phosphorothioate linkage
  modified_base 9: mod_base = OTHER; note = Nucleotide with phosphorothioate linkage
  modified_base 10: mod_base = OTHER; note = Nucleotide with phosphorothioate linkage
  modified_base 11: mod_base = OTHER; note = Nucleotide with phosphorothioate linkage
  modified_base 12: mod_base = OTHER; note = Nucleotide with phosphorothioate linkage
  modified_base 13: mod_base = OTHER; note = Nucleotide with phosphorothioate linkage
  modified_base 14: mod_base = OTHER; note = Nucleotide with phosphorothioate linkage
  modified_base 15: mod_base = OTHER; note = Nucleotide with phosphorothioate linkage
  modified_base 16: mod_base = OTHER; note = 5-methyl beta-D-oxy locked nucleotide with phosphorothioate linkage
  modified_base 17: mod_base = OTHER; note = beta-D-oxy locked nucleotide with phosphorothioate linkage
tccatctcaaaaagact

SEQ ID NO: 540 - DNA, 15 bp, synthetic construct
  source 1..15: mol_type = other DNA
  modified_base 1: mod_base = OTHER; note = beta-D-oxy locked nucleotide with phosphorothioate linkage
  modified_base 2: mod_base = OTHER; note = beta-D-oxy locked nucleotide with phosphorothioate linkage
  modified_base 3: mod_base = OTHER; note = beta-D-oxy locked nucleotide with phosphorothioate linkage
  modified_base 4: mod_base = OTHER; note = Nucleotide with phosphorothioate linkage
  modified_base 5: mod_base = OTHER; note = Nucleotide with phosphorothioate linkage
  modified_base 6: mod_base = OTHER; note = Nucleotide with phosphorothioate linkage
  modified_base 7: mod_base = OTHER; note = Nucleotide with phosphorothioate linkage
  modified_base 8: mod_base = OTHER; note = Nucleotide with phosphorothioate linkage
  modified_base 9: mod_base = OTHER; note = Nucleotide with phosphorothioate linkage
  modified_base 10: mod_base = OTHER; note = Nucleotide with phosphorothioate linkage
  modified_base 11: mod_base = OTHER; note = Nucleotide with phosphorothioate linkage
  modified_base 12: mod_base = OTHER; note = Nucleotide with phosphorothioate linkage
  modified_base 13: mod_base = OTHER; note = beta-D-oxy locked nucleotide with phosphorothioate linkage
  modified_base 14: mod_base = OTHER; note = beta-D-oxy locked nucleotide with phosphorothioate linkage
  modified_base 15: mod_base = OTHER; note = 5-methyl beta-D-oxy locked nucleotide with phosphorothioate linkage
aaggccgccttaaac

SEQ ID NO: 541 - DNA, 16 bp, synthetic construct
  source 1..16: mol_type = other DNA
  modified_base 1: mod_base = OTHER; note = 5-methyl beta-D-oxy locked nucleotide with phosphorothioate linkage
  modified_base 2: mod_base = OTHER; note = beta-D-oxy locked nucleotide with phosphorothioate linkage
  modified_base 3: mod_base = OTHER; note = Nucleotide with phosphorothioate linkage
  modified_base 4: mod_base = OTHER; note = Nucleotide with phosphorothioate linkage
  modified_base 5: mod_base = OTHER; note = Nucleotide with phosphorothioate linkage
  modified_base 6: mod_base = OTHER; note = Nucleotide with phosphorothioate linkage
  modified_base 7: mod_base = OTHER; note = Nucleotide with phosphorothioate linkage
  modified_base 8: mod_base = OTHER; note = Nucleotide with phosphorothioate linkage
  modified_base 9: mod_base = OTHER; note = Nucleotide with phosphorothioate linkage
  modified_base 10: mod_base = OTHER; note = Nucleotide with phosphorothioate linkage
  modified_base 11: mod_base = OTHER; note = Nucleotide with phosphorothioate linkage
  modified_base 12: mod_base = OTHER; note = Nucleotide with phosphorothioate linkage
  modified_base 13: mod_base = OTHER; note = Nucleotide with phosphorothioate linkage
  modified_base 14: mod_base = OTHER; note = beta-D-oxy locked nucleotide with phosphorothioate linkage
  modified_base 15: mod_base = OTHER; note = 5-methyl beta-D-oxy locked nucleotide with phosphorothioate linkage
  modified_base 16: mod_base = OTHER; note = beta-D-oxy locked nucleotide with phosphorothioate linkage
ctatgtaagcccaaca

SEQ ID NO: 542 - DNA, 17 bp, synthetic construct
  source 1..17: mol_type = other DNA
  modified_base 1: mod_base = OTHER; note = beta-D-oxy locked nucleotide with phosphorothioate linkage
  modified_base 2: mod_base = OTHER; note = beta-D-oxy locked nucleotide with phosphorothioate linkage
  modified_base 3: mod_base = OTHER; note = 5-methyl beta-D-oxy locked nucleotide with phosphorothioate linkage
  modified_base 4: mod_base = OTHER; note = Nucleotide with phosphorothioate linkage
  modified_base 5: mod_base = OTHER; note = Nucleotide with phosphorothioate linkage
  modified_base 6: mod_base = OTHER; note = Nucleotide with phosphorothioate linkage
  modified_base 7: mod_base = OTHER; note = Nucleotide with phosphorothioate linkage
  modified_base 8: mod_base = OTHER; note = Nucleotide with phosphorothioate linkage
  modified_base 9: mod_base = OTHER; note = Nucleotide with phosphorothioate linkage
  modified_base 10: mod_base = OTHER; note = Nucleotide with phosphorothioate linkage
  modified_base 11: mod_base = OTHER; note = Nucleotide with phosphorothioate linkage
  modified_base 12: mod_base = OTHER; note = Nucleotide with phosphorothioate linkage
  modified_base 13: mod_base = OTHER; note = Nucleotide with phosphorothioate linkage
  modified_base 14: mod_base = OTHER; note = 5-methyl beta-D-oxy locked nucleotide with phosphorothioate linkage
  modified_base 15: mod_base = OTHER; note = beta-D-oxy locked nucleotide with phosphorothioate linkage
  modified_base 16: mod_base = OTHER; note = beta-D-oxy locked nucleotide with phosphorothioate linkage
  modified_base 17: mod_base = OTHER; note = beta-D-oxy locked nucleotide with phosphorothioate linkage
ttccccctttattcaaa

SEQ ID NO: 543 - DNA, 17 bp, synthetic construct
  source 1..17: mol_type = other DNA
  modified_base 1: mod_base = OTHER; note = 5-methyl beta-D-oxy locked nucleotide with phosphorothioate linkage
  modified_base 2: mod_base = OTHER; note = beta-D-oxy locked nucleotide with phosphorothioate linkage
  modified_base 3: mod_base = OTHER; note = Nucleotide with phosphorothioate linkage
  modified_base 4: mod_base = OTHER; note = Nucleotide with phosphorothioate linkage
  modified_base 5: mod_base = OTHER; note = Nucleotide with phosphorothioate linkage
  modified_base 6: mod_base = OTHER; note = Nucleotide with phosphorothioate linkage
  modified_base 7: mod_base = OTHER; note = Nucleotide with phosphorothioate linkage
  modified_base 8: mod_base = OTHER; note = Nucleotide with phosphorothioate linkage
  modified_base 9: mod_base = OTHER; note = Nucleotide with phosphorothioate linkage
  modified_base 10: mod_base = OTHER; note = Nucleotide with phosphorothioate linkage
  modified_base 11: mod_base = OTHER; note = Nucleotide with phosphorothioate linkage
  modified_base 12: mod_base = OTHER; note = Nucleotide with phosphorothioate linkage
  modified_base 13: mod_base = OTHER; note = Nucleotide with phosphorothioate linkage
  modified_base 14: mod_base = OTHER; note = Nucleotide with phosphorothioate linkage
  modified_base 15: mod_base = OTHER; note = Nucleotide with phosphorothioate linkage
  modified_base 16: mod_base = OTHER; note = beta-D-oxy locked nucleotide with phosphorothioate linkage
  modified_base 17: mod_base = OTHER; note = beta-D-oxy locked nucleotide with phosphorothioate linkage
cttccccctttattcaa

SEQ ID NO: 544 - DNA, 16 bp, synthetic construct
  source 1..16: mol_type = other DNA
  modified_base 1: mod_base = OTHER; note = beta-D-oxy locked nucleotide with phosphorothioate linkage
  modified_base 2: mod_base = OTHER; note = 5-methyl beta-D-oxy locked nucleotide with phosphorothioate linkage
  modified_base 3: mod_base = OTHER; note = Nucleotide with phosphorothioate linkage
  modified_base 4: mod_base = OTHER; note = Nucleotide with phosphorothioate linkage
  modified_base 5: mod_base = OTHER; note = Nucleotide with phosphorothioate linkage
  modified_base 6: mod_base = OTHER; note = Nucleotide with phosphorothioate linkage
  modified_base 7: mod_base = OTHER; note = Nucleotide with phosphorothioate linkage
  modified_base 8: mod_base = OTHER; note = Nucleotide with phosphorothioate linkage
  modified_base 9: mod_base = OTHER; note = Nucleotide with phosphorothioate linkage
  modified_base 10: mod_base = OTHER; note = Nucleotide with phosphorothioate linkage
  modified_base 11: mod_base = OTHER; note = Nucleotide with phosphorothioate linkage
  modified_base 12: mod_base = OTHER; note = Nucleotide with phosphorothioate linkage
  modified_base 13: mod_base = OTHER; note = Nucleotide with phosphorothioate linkage
  modified_base 14: mod_base = OTHER; note = Nucleotide with phosphorothioate linkage
  modified_base 15: mod_base = OTHER; note = beta-D-oxy locked nucleotide with phosphorothioate linkage
  modified_base 16: mod_base = OTHER; note = 5-methyl beta-D-oxy locked nucleotide with phosphorothioate linkage
acattccgcacatctc

SEQ ID NO: 545 - DNA, 15 bp, synthetic construct
  source 1..15: mol_type = other DNA
  modified_base 1: mod_base = OTHER; note = beta-D-oxy locked nucleotide with phosphorothioate linkage
  modified_base 2: mod_base = OTHER; note = beta-D-oxy locked nucleotide with phosphorothioate linkage
  modified_base 3: mod_base = OTHER; note = beta-D-oxy locked nucleotide with phosphorothioate linkage
  modified_base 4: mod_base = OTHER; note = Nucleotide with phosphorothioate linkage
  modified_base 5: mod_base = OTHER; note = Nucleotide with phosphorothioate linkage
  modified_base 6: mod_base = OTHER; note = Nucleotide with phosphorothioate linkage
  modified_base 7: mod_base = OTHER; note = Nucleotide with phosphorothioate linkage
  modified_base 8: mod_base = OTHER; note = Nucleotide with phosphorothioate linkage
  modified_base 9: mod_base = OTHER; note = Nucleotide with phosphorothioate linkage
  modified_base 10: mod_base = OTHER; note = Nucleotide with phosphorothioate linkage
  modified_base 11: mod_base = OTHER; note = Nucleotide with phosphorothioate linkage
  modified_base 12: mod_base = OTHER; note = Nucleotide with phosphorothioate linkage
  modified_base 13: mod_base = OTHER; note = Nucleotide with phosphorothioate linkage
  modified_base 14: mod_base = OTHER; note = beta-D-oxy locked nucleotide with phosphorothioate linkage
  modified_base 15: mod_base = OTHER; note = 5-methyl beta-D-oxy locked nucleotide with phosphorothioate linkage
tatcacattccgcac

SEQ ID NO: 546 - DNA, 16 bp, synthetic construct
  source 1..16: mol_type = other DNA
  modified_base 1: mod_base = OTHER; note = beta-D-oxy locked nucleotide with phosphorothioate linkage
  modified_base 2: mod_base = OTHER; note = beta-D-oxy locked nucleotide with phosphorothioate linkage
  modified_base 3: mod_base = OTHER; note = beta-D-oxy locked nucleotide with phosphorothioate linkage
  modified_base 4: mod_base = OTHER; note = 5-methyl beta-D-oxy locked nucleotide with phosphorothioate linkage
  modified_base 5: mod_base = OTHER; note = Nucleotide with phosphorothioate linkage
  modified_base 6: mod_base = OTHER; note = Nucleotide with phosphorothioate linkage
  modified_base 7: mod_base = OTHER; note = Nucleotide with phosphorothioate linkage
  modified_base 8: mod_base = OTHER; note = Nucleotide with phosphorothioate linkage
  modified_base 9: mod_base = OTHER; note = Nucleotide with phosphorothioate linkage
  modified_base 10: mod_base = OTHER; note = Nucleotide with phosphorothioate linkage
  modified_base 11: mod_base = OTHER; note = Nucleotide with phosphorothioate linkage
  modified_base 12: mod_base = OTHER; note = Nucleotide with phosphorothioate linkage
  modified_base 13: mod_base = OTHER; note = beta-D-oxy locked nucleotide with phosphorothioate linkage
  modified_base 14: mod_base = OTHER; note = beta-D-oxy locked nucleotide with phosphorothioate linkage
  modified_base 15: mod_base = OTHER; note = 5-methyl beta-D-oxy locked nucleotide with phosphorothioate linkage
  modified_base 16: mod_base = OTHER; note = 5-methyl beta-D-oxy locked nucleotide with phosphorothioate linkage
gaacatatcacattcc

SEQ ID NO: 547 - DNA, 16 bp, synthetic construct
  source 1..16: mol_type = other DNA
  modified_base 1: mod_base = OTHER; note = beta-D-oxy locked nucleotide with phosphorothioate linkage
  modified_base 2: mod_base = OTHER; note = 5-methyl beta-D-oxy locked nucleotide with phosphorothioate linkage
  modified_base 3: mod_base = OTHER; note = 5-methyl beta-D-oxy locked nucleotide with phosphorothioate linkage
  modified_base 4: mod_base = OTHER; note = 5-methyl beta-D-oxy locked nucleotide with phosphorothioate linkage
  modified_base 5: mod_base = OTHER; note = Nucleotide with phosphorothioate linkage
  modified_base 6: mod_base = OTHER; note = Nucleotide with phosphorothioate linkage
  modified_base 7: mod_base = OTHER; note = Nucleotide with phosphorothioate linkage
  modified_base 8: mod_base = OTHER; note = Nucleotide with phosphorothioate linkage
  modified_base 9: mod_base = OTHER; note = Nucleotide with phosphorothioate linkage
  modified_base 10: mod_base = OTHER; note = Nucleotide with phosphorothioate linkage
  modified_base 11: mod_base = OTHER; note = Nucleotide with phosphorothioate linkage
  modified_base 12: mod_base = OTHER; note = Nucleotide with phosphorothioate linkage
  modified_base 13: mod_base = OTHER; note = Nucleotide with phosphorothioate linkage
  modified_base 14: mod_base = OTHER; note = beta-D-oxy locked nucleotide with phosphorothioate linkage
  modified_base 15: mod_base = OTHER; note = beta-D-oxy locked nucleotide with phosphorothioate linkage
  modified_base 16: mod_base = OTHER; note = 5-methyl beta-D-oxy locked nucleotide with phosphorothioate linkage
tcccctagaataatac

SEQ ID NO: 548 - DNA, 16 bp, synthetic construct
  source 1..16: mol_type = other DNA
  modified_base 1: mod_base = OTHER; note = beta-D-oxy locked nucleotide with phosphorothioate linkage
  modified_base 2: mod_base = OTHER; note = 5-methyl beta-D-oxy locked nucleotide with phosphorothioate linkage
  modified_base 3: mod_base = OTHER; note = Nucleotide with phosphorothioate linkage
  modified_base 4: mod_base = OTHER; note = Nucleotide with phosphorothioate linkage
  modified_base 5: mod_base = OTHER; note = Nucleotide with phosphorothioate linkage
  modified_base 6: mod_base = OTHER; note = Nucleotide with phosphorothioate linkage
  modified_base 7: mod_base = OTHER; note = Nucleotide with phosphorothioate linkage
  modified_base 8: mod_base = OTHER; note = Nucleotide with phosphorothioate linkage
  modified_base 9: mod_base = OTHER; note = Nucleotide with phosphorothioate linkage
  modified_base 10: mod_base = OTHER; note = Nucleotide with phosphorothioate linkage
  modified_base 11: mod_base = OTHER; note = Nucleotide with phosphorothioate linkage
  modified_base 12: mod_base = OTHER; note = Nucleotide with phosphorothioate linkage
  modified_base 13: mod_base = OTHER; note = beta-D-oxy locked nucleotide with phosphorothioate linkage
  modified_base 14: mod_base = OTHER; note = beta-D-oxy locked nucleotide with phosphorothioate linkage
  modified_base 15: mod_base = OTHER; note = beta-D-oxy locked nucleotide with phosphorothioate linkage
  modified_base 16: mod_base = OTHER; note = beta-D-oxy locked nucleotide with phosphorothioate linkage
actcccctagaataat

SEQ ID NO: 549 - DNA, 15 bp, synthetic construct
  source 1..15: mol_type = other DNA
  modified_base 1: mod_base = OTHER; note = beta-D-oxy locked nucleotide with phosphorothioate linkage
  modified_base 2: mod_base = OTHER; note = beta-D-oxy locked nucleotide with phosphorothioate linkage
  modified_base 3: mod_base = OTHER; note = 5-methyl beta-D-oxy locked nucleotide with phosphorothioate linkage
  modified_base 4: mod_base = OTHER; note = Nucleotide with phosphorothioate linkage
  modified_base 5: mod_base = OTHER; note = Nucleotide with phosphorothioate linkage
  modified_base 6: mod_base = OTHER; note = Nucleotide with phosphorothioate linkage
  modified_base 7: mod_base = OTHER; note = Nucleotide with phosphorothioate linkage
  modified_base 8: mod_base = OTHER; note = Nucleotide with phosphorothioate linkage
  modified_base 9: mod_base = OTHER; note = Nucleotide with phosphorothioate linkage
  modified_base 10: mod_base = OTHER; note = Nucleotide with phosphorothioate linkage
  modified_base 11: mod_base = OTHER; note = Nucleotide with phosphorothioate linkage
  modified_base 12: mod_base = OTHER; note = Nucleotide with phosphorothioate linkage
  modified_base 13: mod_base = OTHER; note = Nucleotide with phosphorothioate linkage
  modified_base 14: mod_base = OTHER; note = beta-D-oxy locked nucleotide with phosphorothioate linkage
  modified_base 15: mod_base = OTHER; note = beta-D-oxy locked nucleotide with phosphorothioate linkage
atcgatactccccta

SEQ ID NO: 550 - DNA, 15 bp, synthetic construct
  source 1..15: mol_type = other DNA
  modified_base 1: mod_base = OTHER; note = beta-D-oxy locked nucleotide with phosphorothioate linkage
  modified_base 2: mod_base = OTHER; note = 5-methyl beta-D-oxy locked nucleotide with phosphorothioate linkage
  modified_base 3: mod_base = OTHER; note = Nucleotide with phosphorothioate linkage
  modified_base 4: mod_base = OTHER; note = Nucleotide with phosphorothioate linkage
  modified_base 5: mod_base = OTHER; note = Nucleotide with phosphorothioate linkage
  modified_base 6: mod_base = OTHER; note = Nucleotide with phosphorothioate linkage
  modified_base 7: mod_base = OTHER; note = Nucleotide with phosphorothioate linkage
  modified_base 8: mod_base = OTHER; note = Nucleotide with phosphorothioate linkage
  modified_base 9: mod_base = OTHER; note = Nucleotide with phosphorothioate linkage
  modified_base 10: mod_base = OTHER; note = Nucleotide with phosphorothioate linkage
  modified_base 11: mod_base = OTHER; note = Nucleotide with phosphorothioate linkage
  modified_base 12: mod_base = OTHER; note = Nucleotide with phosphorothioate linkage
  modified_base 13: mod_base = OTHER; note = Nucleotide with phosphorothioate linkage
  modified_base 14: mod_base = OTHER; note = 5-methyl beta-D-oxy locked nucleotide with phosphorothioate linkage
  modified_base 15: mod_base = OTHER; note = 5-methyl beta-D-oxy locked nucleotide with phosphorothioate linkage
acatcgatactcccc

SEQ ID NO: 551 - DNA, 18 bp, synthetic construct
  source 1..18: mol_type = other DNA
  modified_base 1: mod_base = OTHER; note = beta-D-oxy locked nucleotide with phosphorothioate linkage
  modified_base 2: mod_base = OTHER; note = beta-D-oxy locked nucleotide with phosphorothioate linkage
  modified_base 3: mod_base = OTHER; note = Nucleotide with phosphorothioate linkage
  modified_base 4: mod_base = OTHER; note = Nucleotide with phosphorothioate linkage
  modified_base 5: mod_base = OTHER; note = Nucleotide with phosphorothioate linkage
  modified_base 6: mod_base = OTHER; note = Nucleotide with phosphorothioate linkage
  modified_base 7: mod_base = OTHER; note = Nucleotide with phosphorothioate linkage
  modified_base 8: mod_base = OTHER; note = Nucleotide with phosphorothioate linkage
  modified_base 9: mod_base = OTHER; note = Nucleotide with phosphorothioate linkage
  modified_base 10: mod_base = OTHER; note = Nucleotide with phosphorothioate linkage
  modified_base 11: mod_base = OTHER; note = Nucleotide with phosphorothioate linkage
  modified_base 12: mod_base = OTHER; note = Nucleotide with phosphorothioate linkage
  modified_base 13: mod_base = OTHER; note = Nucleotide with phosphorothioate linkage
  modified_base 14: mod_base = OTHER; note = Nucleotide with phosphorothioate linkage
  modified_base 15: mod_base = OTHER; note = Nucleotide with phosphorothioate linkage
  modified_base 16: mod_base = OTHER; note = Nucleotide with phosphorothioate linkage
  modified_base 17: mod_base = OTHER; note = beta-D-oxy locked nucleotide with phosphorothioate linkage
  modified_base 18: mod_base = OTHER; note = beta-D-oxy locked nucleotide with phosphorothioate linkage
tttacccatctcccattt

SEQ ID NO: 552 - DNA, 17 bp, synthetic construct
  source 1..17: mol_type = other DNA
  modified_base 1: mod_base = OTHER; note = beta-D-oxy locked nucleotide with phosphorothioate linkage
  modified_base 2: mod_base = OTHER; note = beta-D-oxy locked nucleotide with phosphorothioate linkage
  modified_base 3: mod_base = OTHER; note = Nucleotide with phosphorothioate linkage
  modified_base 4: mod_base = OTHER; note = Nucleotide with phosphorothioate linkage
  modified_base 5: mod_base = OTHER; note = Nucleotide with phosphorothioate linkage
  modified_base 6: mod_base = OTHER; note = Nucleotide with phosphorothioate linkage
  modified_base 7: mod_base = OTHER; note = Nucleotide with phosphorothioate linkage
  modified_base 8: mod_base = OTHER; note = Nucleotide with phosphorothioate linkage
  modified_base 9: mod_base = OTHER; note = Nucleotide with phosphorothioate linkage
  modified_base 10: mod_base = OTHER; note = Nucleotide with phosphorothioate linkage
  modified_base 11: mod_base = OTHER; note = Nucleotide with phosphorothioate linkage
  modified_base 12: mod_base = OTHER; note = Nucleotide with phosphorothioate linkage
  modified_base 13: mod_base = OTHER; note = Nucleotide with phosphorothioate linkage
  modified_base 14: mod_base = OTHER; note = Nucleotide with phosphorothioate linkage
  modified_base 15: mod_base = OTHER; note = Nucleotide with phosphorothioate linkage
  modified_base 16: mod_base = OTHER; note = beta-D-oxy locked nucleotide with phosphorothioate linkage
  modified_base 17: mod_base = OTHER; note = beta-D-oxy locked nucleotide with phosphorothioate linkage
atttacccatctcccat

SEQ ID NO: 553 - DNA, 16 bp, synthetic construct
  source 1..16: mol_type = other DNA
  modified_base 1: mod_base = OTHER; note = beta-D-oxy locked nucleotide with phosphorothioate linkage
  modified_base 2: mod_base = OTHER; note = beta-D-oxy locked nucleotide with phosphorothioate linkage
  modified_base 3: mod_base = OTHER; note = Nucleotide with phosphorothioate linkage
  modified_base 4: mod_base = OTHER; note = Nucleotide with phosphorothioate linkage
  modified_base 5: mod_base = OTHER; note = Nucleotide with phosphorothioate linkage
  modified_base 6: mod_base = OTHER; note = Nucleotide with phosphorothioate linkage
  modified_base 7: mod_base = OTHER; note = Nucleotide with phosphorothioate linkage
  modified_base 8: mod_base = OTHER; note = Nucleotide with phosphorothioate linkage
  modified_base 9: mod_base = OTHER; note = Nucleotide with phosphorothioate linkage
  modified_base 10: mod_base = OTHER; note = Nucleotide with phosphorothioate linkage
  modified_base 11: mod_base = OTHER; note = Nucleotide with phosphorothioate linkage
  modified_base 12: mod_base = OTHER; note = Nucleotide with phosphorothioate linkage
  modified_base 13: mod_base = OTHER; note = Nucleotide with phosphorothioate linkage
  modified_base 14: mod_base = OTHER; note = Nucleotide with phosphorothioate linkage
  modified_base 15: mod_base = OTHER; note = 5-methyl beta-D-oxy locked nucleotide with phosphorothioate linkage
  modified_base 16: mod_base = OTHER; note = beta-D-oxy locked nucleotide with phosphorothioate linkage
ggaagctcaataccca

SEQ ID NO: 554 - DNA, 17 bp, synthetic construct
  source 1..17: mol_type = other DNA
  modified_base 1: mod_base = OTHER; note = beta-D-oxy locked nucleotide with phosphorothioate linkage
  modified_base 2: mod_base = OTHER; note = beta-D-oxy locked nucleotide with phosphorothioate linkage
  modified_base 3: mod_base = OTHER; note = Nucleotide with phosphorothioate linkage
  modified_base 4: mod_base = OTHER; note = Nucleotide with phosphorothioate linkage
  modified_base 5: mod_base = OTHER; note = Nucleotide with phosphorothioate linkage
  modified_base 6: mod_base = OTHER; note = Nucleotide with phosphorothioate linkage
  modified_base 7: mod_base = OTHER; note = Nucleotide with phosphorothioate linkage
  modified_base 8: mod_base = OTHER; note = Nucleotide with phosphorothioate linkage
  modified_base 9: mod_base = OTHER; note = Nucleotide with phosphorothioate linkage
  modified_base 10: mod_base = OTHER; note = Nucleotide with phosphorothioate linkage
  modified_base 11: mod_base = OTHER; note = Nucleotide with phosphorothioate linkage
  modified_base 12: mod_base = OTHER; note = Nucleotide with phosphorothioate linkage
  modified_base 13: mod_base = OTHER; note = Nucleotide with phosphorothioate linkage
  modified_base 14: mod_base = OTHER; note = Nucleotide with phosphorothioate linkage
  modified_base 15: mod_base = OTHER; note = Nucleotide with phosphorothioate linkage
  modified_base 16: mod_base = OTHER; note = beta-D-oxy locked nucleotide with phosphorothioate linkage
  modified_base 17: mod_base = OTHER; note = 5-methyl beta-D-oxy locked nucleotide with phosphorothioate linkage
gtttctacccacaccac

SEQ ID NO: 555 - DNA, 17 bp, synthetic construct
  source 1..17: mol_type = other DNA
  modified_base 1: mod_base = OTHER; note = beta-D-oxy locked nucleotide with phosphorothioate linkage
  modified_base 2: mod_base = OTHER; note = beta-D-oxy locked nucleotide with phosphorothioate linkage
  modified_base 3: mod_base = OTHER; note = 5-methyl beta-D-oxy locked nucleotide with phosphorothioate linkage
  modified_base 4: mod_base = OTHER; note = Nucleotide with phosphorothioate linkage
  modified_base 5: mod_base = OTHER; note = Nucleotide with phosphorothioate linkage
  modified_base 6: mod_base = OTHER; note = Nucleotide with phosphorothioate linkage
  modified_base 7: mod_base = OTHER; note = Nucleotide with phosphorothioate linkage
  modified_base 8: mod_base = OTHER; note = Nucleotide with phosphorothioate linkage
  modified_base 9: mod_base = OTHER; note = Nucleotide with phosphorothioate linkage
  modified_base 10: mod_base = OTHER; note = Nucleotide with phosphorothioate linkage
  modified_base 11: mod_base = OTHER; note = Nucleotide with phosphorothioate linkage
  modified_base 12: mod_base = OTHER; note = Nucleotide with phosphorothioate linkage
  modified_base 13: mod_base = OTHER; note = Nucleotide with phosphorothioate linkage
  modified_base 14: mod_base = OTHER; note = Nucleotide with phosphorothioate linkage
  modified_base 15: mod_base = OTHER; note = Nucleotide with phosphorothioate linkage
  modified_base 16: mod_base = OTHER; note = 5-methyl beta-D-oxy locked nucleotide with phosphorothioate linkage
  modified_base 17: mod_base = OTHER; note = beta-D-oxy locked nucleotide with phosphorothioate linkage
tacagtttctacccaca

SEQ ID NO: 556 - DNA, 17 bp, synthetic construct
  source 1..17: mol_type = other DNA
  modified_base 1: mod_base = OTHER; note = 5-methyl beta-D-oxy locked nucleotide with phosphorothioate linkage
  modified_base 2: mod_base = OTHER; note = beta-D-oxy locked nucleotide with phosphorothioate linkage
  modified_base 3: mod_base = OTHER; note = Nucleotide with phosphorothioate linkage
  modified_base 4: mod_base = OTHER; note = Nucleotide with phosphorothioate linkage
  modified_base 5: mod_base = OTHER; note = Nucleotide with phosphorothioate linkage
  modified_base 6: mod_base = OTHER; note = Nucleotide with phosphorothioate linkage
  modified_base 7: mod_base = OTHER; note = Nucleotide with phosphorothioate linkage
  modified_base 8: mod_base = OTHER; note = Nucleotide with phosphorothioate linkage
  modified_base 9: mod_base = OTHER; note = Nucleotide with phosphorothioate linkage
  modified_base 10: mod_base = OTHER; note = Nucleotide with phosphorothioate linkage
  modified_base 11: mod_base = OTHER; note = Nucleotide with phosphorothioate linkage
  modified_base 12: mod_base = OTHER; note = Nucleotide with phosphorothioate linkage
  modified_base 13: mod_base = OTHER; note = Nucleotide with phosphorothioate linkage
  modified_base 14: mod_base = OTHER; note = Nucleotide with phosphorothioate linkage
  modified_base 15: mod_base = OTHER; note = Nucleotide with phosphorothioate linkage
  modified_base 16: mod_base = OTHER; note = beta-D-oxy locked nucleotide with phosphorothioate linkage
  modified_base 17: mod_base = OTHER; note = 5-methyl beta-D-oxy locked nucleotide with phosphorothioate linkage
ctacagtttctacccac

SEQ ID NO: 557 - DNA, 17 bp, synthetic construct
  source 1..17: mol_type = other DNA
  modified_base 1: mod_base = OTHER; note = beta-D-oxy locked nucleotide with phosphorothioate linkage
  modified_base 2: mod_base = OTHER; note = beta-D-oxy locked nucleotide with phosphorothioate linkage
  modified_base 3: mod_base = OTHER; note = beta-D-oxy locked nucleotide with phosphorothioate linkage
  modified_base 4: mod_base = OTHER; note = Nucleotide with phosphorothioate linkage
  modified_base 5: mod_base = OTHER; note = Nucleotide with phosphorothioate linkage
  modified_base 6: mod_base = OTHER; note = Nucleotide with phosphorothioate linkage
  modified_base 7: mod_base = OTHER; note = Nucleotide with phosphorothioate linkage
  modified_base 8: mod_base = OTHER; note = Nucleotide with phosphorothioate linkage
  modified_base 9: mod_base = OTHER; note = Nucleotide with phosphorothioate linkage
  modified_base 10: mod_base = OTHER; note = Nucleotide with phosphorothioate linkage
  modified_base 11: mod_base = OTHER; note = Nucleotide with phosphorothioate linkage
  modified_base 12: mod_base = OTHER; note = Nucleotide with phosphorothioate linkage
  modified_base 13: mod_base = OTHER; note = Nucleotide with phosphorothioate linkage
  modified_base 14: mod_base = OTHER; note = beta-D-oxy locked nucleotide with phosphorothioate linkage
  modified_base 15: mod_base = OTHER; note = 5-methyl beta-D-oxy locked nucleotide with phosphorothioate linkage
  modified_base 16: mod_base = OTHER; note = beta-D-oxy locked nucleotide with phosphorothioate linkage
  modified_base 17: mod_base = OTHER; note = beta-D-oxy locked nucleotide with phosphorothioate linkage
gtaacagctaatttcat

SEQ ID NO: 558 - DNA, 17 bp, synthetic construct
  source 1..17: mol_type = other DNA
  modified_base 1: mod_base = OTHER; note = beta-D-oxy locked nucleotide with phosphorothioate linkage
  modified_base 2: mod_base = OTHER; note = beta-D-oxy locked nucleotide with phosphorothioate linkage
  modified_base 3: mod_base = OTHER; note = beta-D-oxy locked nucleotide with phosphorothioate linkage
  modified_base 4: mod_base = OTHER; note = Nucleotide with phosphorothioate linkage
  modified_base 5: mod_base = OTHER; note = Nucleotide with phosphorothioate linkage
  modified_base 6: mod_base = OTHER; note = Nucleotide with phosphorothioate linkage
  modified_base 7: mod_base = OTHER; note = Nucleotide with phosphorothioate linkage
  modified_base 8: mod_base = OTHER; note = Nucleotide with phosphorothioate linkage
  modified_base 9: mod_base = OTHER; note = Nucleotide with phosphorothioate linkage
  modified_base 10: mod_base = OTHER; note = Nucleotide with phosphorothioate linkage
  modified_base 11: mod_base = OTHER; note = Nucleotide with phosphorothioate linkage
  modified_base 12: mod_base = OTHER; note = Nucleotide with phosphorothioate linkage
  modified_base 13: mod_base = OTHER; note = Nucleotide with phosphorothioate linkage
  modified_base 14: mod_base = OTHER; note = Nucleotide with phosphorothioate linkage
  modified_base 15: mod_base = OTHER; note = 5-methyl beta-D-oxy locked nucleotide with phosphorothioate linkage
  modified_base 16: mod_base = OTHER; note = beta-D-oxy locked nucleotide with phosphorothioate linkage
  modified_base 17: mod_base = OTHER; note = 5-methyl beta-D-oxy locked nucleotide with phosphorothioate linkage
agttcctatcacttcac

SEQ ID NO: 559 - DNA, 18 bp, synthetic construct
  source 1..18: mol_type = other DNA
  modified_base 1: mod_base = OTHER; note = beta-D-oxy locked nucleotide with phosphorothioate linkage
  modified_base 2: mod_base = OTHER; note = beta-D-oxy locked nucleotide with phosphorothioate linkage
  modified_base 3: mod_base = OTHER; note = 5-methyl beta-D-oxy locked nucleotide with phosphorothioate linkage
  modified_base 4: mod_base = OTHER; note = Nucleotide with phosphorothioate linkage
  modified_base 5: mod_base = OTHER; note = Nucleotide with phosphorothioate linkage
  modified_base 6: mod_base = OTHER; note = Nucleotide with phosphorothioate linkage
  modified_base 7: mod_base = OTHER; note = Nucleotide with phosphorothioate linkage
  modified_base 8: mod_base = OTHER; note = Nucleotide with phosphorothioate linkage
  modified_base 9: mod_base = OTHER; note = Nucleotide with phosphorothioate linkage
  modified_base 10: mod_base = OTHER; note = Nucleotide with phosphorothioate linkage
  modified_base 11: mod_base = OTHER; note = Nucleotide with phosphorothioate linkage
  modified_base 12: mod_base = OTHER; note = Nucleotide with phosphorothioate linkage
  modified_base 13: mod_base = OTHER; note = Nucleotide with phosphorothioate linkage
  modified_base 14: mod_base = OTHER; note = Nucleotide with phosphorothioate linkage
  modified_base 15: mod_base = OTHER; note = Nucleotide with phosphorothioate linkage
  modified_base 16: mod_base = OTHER; note = Nucleotide with phosphorothioate linkage
  modified_base 17: mod_base = OTHER; note = 5-methyl beta-D-oxy locked nucleotide with phosphorothioate linkage
  modified_base 18: mod_base = OTHER; note = beta-D-oxy locked nucleotide with phosphorothioate linkage
atcctttctcagaatcca

SEQ ID NO: 560 - DNA, 17 bp, synthetic construct
  source 1..17: mol_type = other DNA
  modified_base 1: mod_base = OTHER; note = beta-D-oxy locked nucleotide with phosphorothioate linkage
  modified_base 2: mod_base = OTHER; note = beta-D-oxy locked nucleotide with phosphorothioate linkage
  modified_base 3: mod_base = OTHER; note = Nucleotide with phosphorothioate linkage
  modified_base 4: mod_base = OTHER; note = Nucleotide with phosphorothioate linkage
  modified_base 5: mod_base = OTHER; note = Nucleotide with phosphorothioate linkage
  modified_base 6: mod_base = OTHER; note = Nucleotide with phosphorothioate linkage
  modified_base 7: mod_base = OTHER; note = Nucleotide with phosphorothioate linkage
  modified_base 8: mod_base = OTHER; note = Nucleotide with phosphorothioate linkage
  modified_base 9: mod_base = OTHER; note = Nucleotide with phosphorothioate linkage
  modified_base 10: mod_base = OTHER; note = Nucleotide with phosphorothioate linkage
  modified_base 11: mod_base = OTHER; note = Nucleotide with phosphorothioate linkage
  modified_base 12: mod_base = OTHER; note = Nucleotide with phosphorothioate linkage
  modified_base 13: mod_base = OTHER; note = Nucleotide with phosphorothioate linkage
  modified_base 14: mod_base = OTHER; note = Nucleotide with phosphorothioate linkage
  modified_base 15: mod_base = OTHER; note = Nucleotide with phosphorothioate linkage
  modified_base 16: mod_base = OTHER; note = 5-methyl beta-D-oxy locked nucleotide with phosphorothioate linkage
  modified_base 17: mod_base = OTHER; note = beta-D-oxy locked nucleotide with phosphorothioate linkage
attggtctcacaactca

SEQ ID NO: 561 - DNA, 17 bp, synthetic construct
  source 1..17: mol_type = other DNA
  modified_base 1: mod_base = OTHER; note = beta-D-oxy locked nucleotide with phosphorothioate linkage
  modified_base 2: mod_base = OTHER; note = 5-methyl beta-D-oxy locked nucleotide with phosphorothioate linkage
  modified_base 3: mod_base = OTHER; note = Nucleotide with phosphorothioate linkage
  modified_base 4: mod_base = OTHER; note = Nucleotide with phosphorothioate linkage
  modified_base 5: mod_base = OTHER; note = Nucleotide with phosphorothioate linkage
  modified_base 6: mod_base = OTHER; note = Nucleotide with phosphorothioate linkage
  modified_base 7: mod_base = OTHER; note = Nucleotide with phosphorothioate linkage
  modified_base 8: mod_base = OTHER; note = Nucleotide with phosphorothioate linkage
  modified_base 9: mod_base = OTHER; note = Nucleotide with phosphorothioate linkage
  modified_base 10: mod_base = OTHER; note = Nucleotide with phosphorothioate linkage
  modified_base 11: mod_base = OTHER; note = Nucleotide with phosphorothioate linkage
  modified_base 12: mod_base = OTHER; note = Nucleotide with phosphorothioate linkage
  modified_base 13: mod_base = OTHER; note = Nucleotide with phosphorothioate linkage
  modified_base 14: mod_base = OTHER; note = 5-methyl beta-D-oxy locked nucleotide with phosphorothioate linkage
  modified_base 15: mod_base = OTHER; note = beta-D-oxy locked nucleotide with phosphorothioate linkage
  modified_base 16: mod_base = OTHER; note = beta-D-oxy locked nucleotide with phosphorothioate linkage
  modified_base 17: mod_base = OTHER; note = beta-D-oxy locked nucleotide with phosphorothioate linkage
acccaactagatccaat

SEQ ID NO: 562 - DNA, 16 bp, synthetic construct
  source 1..16: mol_type = other DNA
  modified_base 1: mod_base = OTHER; note = beta-D-oxy locked nucleotide with phosphorothioate linkage
  modified_base 2: mod_base = OTHER; note = beta-D-oxy locked nucleotide with phosphorothioate linkage
  modified_base 3: mod_base = OTHER; note = beta-D-oxy locked nucleotide with phosphorothioate linkage
  modified_base 4: mod_base = OTHER; note = beta-D-oxy locked nucleotide with phosphorothioate linkage
  modified_base 5: mod_base = OTHER; note = Nucleotide with phosphorothioate linkage
  modified_base 6: mod_base = OTHER; note = Nucleotide with phosphorothioate linkage
  modified_base 7: mod_base = OTHER; note = Nucleotide with phosphorothioate linkage
  modified_base 8: mod_base = OTHER; note = Nucleotide with phosphorothioate linkage
  modified_base 9: mod_base = OTHER; note = Nucleotide with phosphorothioate linkage
  modified_base 10: mod_base = OTHER; note = Nucleotide with phosphorothioate linkage
  modified_base 11: mod_base = OTHER; note = Nucleotide with phosphorothioate linkage
  modified_base 12: mod_base = OTHER; note = Nucleotide with phosphorothioate linkage
  modified_base 13: mod_base = OTHER; note = beta-D-oxy locked nucleotide with phosphorothioate linkage
  modified_base 14: mod_base = OTHER; note = beta-D-oxy locked nucleotide with phosphorothioate linkage
  modified_base 15: mod_base = OTHER; note = beta-D-oxy locked nucleotide with phosphorothioate linkage
  modified_base 16: mod_base = OTHER; note = 5-methyl beta-D-oxy locked nucleotide with phosphorothioate linkage
ataattcatgcttaac

SEQ ID NO: 563 - DNA, 17 bp, synthetic construct
  source 1..17: mol_type = other DNA
  modified_base 1: mod_base = OTHER; note = beta-D-oxy locked nucleotide with phosphorothioate linkage
  modified_base 2: mod_base = OTHER; note = beta-D-oxy locked nucleotide with phosphorothioate linkage
  modified_base 3: mod_base = OTHER; note = beta-D-oxy locked nucleotide with phosphorothioate linkage
  modified_base 4: mod_base = OTHER; note = beta-D-oxy locked nucleotide with phosphorothioate linkage
  modified_base 5: mod_base = OTHER; note = Nucleotide with phosphorothioate linkage
  modified_base 6: mod_base = OTHER; note = Nucleotide with phosphorothioate linkage
  modified_base 7: mod_base = OTHER; note = Nucleotide with phosphorothioate linkage
  modified_base 8: mod_base = OTHER; note = Nucleotide with phosphorothioate linkage
  modified_base 9: mod_base = OTHER; note = Nucleotide with phosphorothioate linkage
  modified_base 10: mod_base = OTHER; note = Nucleotide with phosphorothioate linkage
  modified_base 11: mod_base = OTHER; note = Nucleotide with phosphorothioate linkage
  modified_base 12: mod_base = OTHER; note = Nucleotide with phosphorothioate linkage
  modified_base 13: mod_base = OTHER; note = Nucleotide with phosphorothioate linkage
  modified_base 14: mod_base = OTHER; note = beta-D-oxy locked nucleotide with phosphorothioate linkage
  modified_base 15: mod_base = OTHER; note = 5-methyl beta-D-oxy locked nucleotide with phosphorothioate linkage
  modified_base 16: mod_base = OTHER; note = beta-D-oxy locked nucleotide with phosphorothioate linkage
  modified_base 17: mod_base = OTHER; note = beta-D-oxy locked nucleotide with phosphorothioate linkage
atgaatgactaaatcta

SEQ ID NO: 564 - DNA, 18 bp, synthetic construct
  source 1..18: mol_type = other DNA
  modified_base 1: mod_base = OTHER; note = 5-methyl beta-D-oxy locked nucleotide with phosphorothioate linkage
  modified_base 2: mod_base = OTHER; note = beta-D-oxy locked nucleotide with phosphorothioate linkage
  modified_base 3: mod_base = OTHER; note = Nucleotide with phosphorothioate linkage
  modified_base 4: mod_base = OTHER; note = Nucleotide with phosphorothioate linkage
  modified_base 5: mod_base = OTHER; note = Nucleotide with phosphorothioate linkage
  modified_base 6: mod_base = OTHER; note = Nucleotide with phosphorothioate linkage
  modified_base 7: mod_base = OTHER; note = Nucleotide with phosphorothioate linkage
  modified_base 8: mod_base = OTHER; note = Nucleotide with phosphorothioate linkage
  modified_base 9: mod_base = OTHER; note = Nucleotide with phosphorothioate linkage
  modified_base 10: mod_base = OTHER; note = Nucleotide with phosphorothioate linkage
  modified_base 11: mod_base = OTHER; note = Nucleotide with phosphorothioate linkage
  modified_base 12: mod_base = OTHER; note = Nucleotide with phosphorothioate linkage
  modified_base 13: mod_base = OTHER; note = Nucleotide with phosphorothioate linkage
  modified_base 14: mod_base = OTHER; note = Nucleotide with phosphorothioate linkage
  modified_base 15: mod_base = OTHER; note = Nucleotide with phosphorothioate linkage
  modified_base 16: mod_base = OTHER; note = 5-methyl beta-D-oxy locked nucleotide with phosphorothioate linkage
  modified_base 17: mod_base = OTHER; note = beta-D-oxy locked nucleotide with phosphorothioate linkage
  modified_base 18: mod_base = OTHER; note = 5-methyl beta-D-oxy locked nucleotide with phosphorothioate linkage
cacatctgacttttcctc

SEQ ID NO: 565 - DNA, 16 bp, synthetic construct
  source 1..16: mol_type = other DNA
  modified_base 1: mod_base = OTHER; note = beta-D-oxy locked nucleotide with phosphorothioate linkage
  modified_base 2: mod_base = OTHER; note = beta-D-oxy locked nucleotide with phosphorothioate linkage
  modified_base 3: mod_base = OTHER; note = Nucleotide with phosphorothioate linkage
  modified_base 4: mod_base = OTHER; note = Nucleotide with phosphorothioate linkage
  modified_base 5: mod_base = OTHER; note = Nucleotide with phosphorothioate linkage
  modified_base 6: mod_base = OTHER; note = Nucleotide with phosphorothioate linkage
  modified_base 7: mod_base = OTHER; note = Nucleotide with phosphorothioate linkage
  modified_base 8: mod_base = OTHER; note = Nucleotide with phosphorothioate linkage
  modified_base 9: mod_base = OTHER; note = Nucleotide with phosphorothioate linkage
  modified_base 10: mod_base = OTHER; note = Nucleotide with phosphorothioate linkage
  modified_base 11: mod_base = OTHER; note = Nucleotide with phosphorothioate linkage
  modified_base 12: mod_base = OTHER; note = Nucleotide with phosphorothioate linkage
  modified_base 13: mod_base = OTHER; note = Nucleotide with phosphorothioate linkage
  modified_base 14: mod_base = OTHER; note = Nucleotide with phosphorothioate linkage
  modified_base 15: mod_base = OTHER; note = 5-methyl beta-D-oxy locked nucleotide with phosphorothioate linkage
  modified_base 16: mod_base = OTHER; note = beta-D-oxy locked nucleotide with phosphorothioate linkage
tagtcaactacctcca

SEQ ID NO: 566 - DNA, 16 bp, synthetic construct
  source 1..16: mol_type = other DNA
  modified_base 1: mod_base = OTHER; note = beta-D-oxy locked nucleotide with phosphorothioate linkage
  modified_base 2: mod_base = OTHER; note = beta-D-oxy locked nucleotide with phosphorothioate linkage
  modified_base 3: mod_base = OTHER; note = beta-D-oxy locked nucleotide with phosphorothioate linkage
  modified_base 4: mod_base = OTHER; note = beta-D-oxy locked nucleotide with phosphorothioate linkage
  modified_base 5: mod_base = OTHER; note = Nucleotide with phosphorothioate linkage
  modified_base 6: mod_base = OTHER; note = Nucleotide with phosphorothioate linkage
  modified_base 7: mod_base = OTHER; note = Nucleotide with phosphorothioate linkage
  modified_base 8: mod_base = OTHER; note = Nucleotide with phosphorothioate linkage
  modified_base 9: mod_base = OTHER; note = Nucleotide with phosphorothioate linkage
  modified_base 10: mod_base = OTHER; note = Nucleotide with phosphorothioate linkage
  modified_base 11: mod_base = OTHER; note = Nucleotide with phosphorothioate linkage
  modified_base 12: mod_base = OTHER; note = Nucleotide with phosphorothioate linkage
  modified_base 13: mod_base = OTHER; note = Nucleotide with phosphorothioate linkage
  modified_base 14: mod_base = OTHER; note = Nucleotide with phosphorothioate linkage
  modified_base 15: mod_base = OTHER; note = 5-methyl beta-D-oxy locked nucleotide with phosphorothioate linkage
  modified_base 16: mod_base = OTHER; note = 5-methyl beta-D-oxy locked nucleotide with phosphorothioate linkage
ttagtcaactacctcc

SEQ ID NO: 567 - DNA, 16 bp, synthetic construct
  source 1..16: mol_type = other DNA
  modified_base 1: mod_base = OTHER; note = beta-D-oxy locked nucleotide with phosphorothioate linkage
  modified_base 2: mod_base = OTHER; note = 5-methyl beta-D-oxy locked nucleotide with phosphorothioate linkage
  modified_base 3: mod_base = OTHER; note = beta-D-oxy locked nucleotide with phosphorothioate linkage
  modified_base 4: mod_base = OTHER; note = beta-D-oxy locked nucleotide with phosphorothioate linkage
  modified_base 5: mod_base = OTHER; note = Nucleotide with phosphorothioate linkage
  modified_base 6: mod_base = OTHER; note = Nucleotide with phosphorothioate linkage
  modified_base 7: mod_base = OTHER; note = Nucleotide with phosphorothioate linkage
  modified_base 8: mod_base = OTHER; note = Nucleotide with phosphorothioate linkage
  modified_base 9: mod_base = OTHER; note = Nucleotide with phosphorothioate linkage
  modified_base 10: mod_base = OTHER; note = Nucleotide with phosphorothioate linkage
  modified_base 11: mod_base = OTHER; note = Nucleotide with phosphorothioate linkage
  modified_base 12: mod_base = OTHER; note = Nucleotide with phosphorothioate linkage
  modified_base 13: mod_base = OTHER; note = Nucleotide with phosphorothioate linkage
  modified_base 14: mod_base = OTHER; note = beta-D-oxy locked nucleotide with phosphorothioate linkage
  modified_base 15: mod_base = OTHER; note = beta-D-oxy locked nucleotide with phosphorothioate linkage
  modified_base 16: mod_base = OTHER; note = 5-methyl beta-D-oxy locked nucleotide with phosphorothioate linkage
tcagcatgtcttaatc

SEQ ID NO: 568 - DNA, 17 bp, synthetic construct
  source 1..17: mol_type = other DNA
  modified_base 1: mod_base = OTHER; note = 5-methyl beta-D-oxy locked nucleotide with phosphorothioate linkage
  modified_base 2: mod_base = OTHER; note = beta-D-oxy locked nucleotide with phosphorothioate linkage
  modified_base 3: mod_base = OTHER; note = beta-D-oxy locked nucleotide with phosphorothioate linkage
  modified_base 4: mod_base = OTHER; note = Nucleotide with phosphorothioate linkage
  modified_base 5: mod_base = OTHER; note = Nucleotide with phosphorothioate linkage
  modified_base 6: mod_base = OTHER; note = Nucleotide with phosphorothioate linkage
  modified_base 7: mod_base = OTHER; note = Nucleotide with phosphorothioate linkage
  modified_base 8: mod_base = OTHER; note = Nucleotide with phosphorothioate linkage
  modified_base 9: mod_base = OTHER; note = Nucleotide with phosphorothioate linkage
  modified_base 10: mod_base = OTHER; note = Nucleotide with phosphorothioate linkage
  modified_base 11: mod_base = OTHER; note = Nucleotide with phosphorothioate linkage
  modified_base 12: mod_base = OTHER; note = Nucleotide with phosphorothioate linkage
  modified_base 13: mod_base = OTHER; note = Nucleotide with phosphorothioate linkage
  modified_base 14: mod_base = OTHER; note = 5-methyl beta-D-oxy locked nucleotide with phosphorothioate linkage
  modified_base 15: mod_base = OTHER; note = beta-D-oxy locked nucleotide with phosphorothioate linkage
  modified_base 16: mod_base = OTHER; note = beta-D-oxy locked nucleotide with phosphorothioate linkage
  modified_base 17: mod_base = OTHER; note = beta-D-oxy locked nucleotide with phosphorothioate linkage
caaatgttctacccaat

SEQ ID NO: 569 - DNA, 17 bp, synthetic construct
  source 1..17: mol_type = other DNA
  modified_base 1: mod_base = OTHER; note = beta-D-oxy locked nucleotide with phosphorothioate linkage
  modified_base 2: mod_base = OTHER; note = 5-methyl beta-D-oxy locked nucleotide with phosphorothioate linkage
  modified_base 3: mod_base = OTHER; note = beta-D-oxy locked nucleotide with phosphorothioate linkage
  modified_base 4: mod_base = OTHER; note = Nucleotide with phosphorothioate linkage
  modified_base 5: mod_base = OTHER; note = Nucleotide with phosphorothioate linkage
  modified_base 6: mod_base = OTHER; note = Nucleotide with phosphorothioate linkage
  modified_base 7: mod_base = OTHER; note = Nucleotide with phosphorothioate linkage
  modified_base 8: mod_base = OTHER; note = Nucleotide with phosphorothioate linkage
  modified_base 9: mod_base = OTHER; note = Nucleotide with phosphorothioate linkage
  modified_base 10: mod_base = OTHER; note = Nucleotide with phosphorothioate linkage
  modified_base 11: mod_base = OTHER; note = Nucleotide with phosphorothioate linkage
  modified_base 12: mod_base = OTHER; note = Nucleotide with phosphorothioate linkage
  modified_base 13: mod_base = OTHER; note = Nucleotide with phosphorothioate linkage
  modified_base 14: mod_base = OTHER; note = 5-methyl beta-D-oxy locked nucleotide with phosphorothioate linkage
  modified_base 15: mod_base = OTHER; note = 5-methyl beta-D-oxy locked nucleotide with phosphorothioate linkage
  modified_base 16: mod_base = OTHER; note = beta-D-oxy locked nucleotide with phosphorothioate linkage
  modified_base 17: mod_base = OTHER; note = beta-D-oxy locked nucleotide with phosphorothioate linkage
tcaaatgttctacccaa

SEQ ID NO: 570 - DNA, 18 bp, synthetic construct
  source 1..18: mol_type = other DNA
  modified_base 1: mod_base = OTHER; note = beta-D-oxy locked nucleotide with phosphorothioate linkage
  modified_base 2: mod_base = OTHER; note = beta-D-oxy locked nucleotide with phosphorothioate linkage
  modified_base 3: mod_base = OTHER; note = beta-D-oxy locked nucleotide with phosphorothioate linkage
  modified_base 4: mod_base = OTHER; note = beta-D-oxy locked nucleotide with phosphorothioate linkage
  modified_base 5: mod_base = OTHER; note = Nucleotide with phosphorothioate linkage
  modified_base 6: mod_base = OTHER; note = Nucleotide with phosphorothioate linkage
  modified_base 7: mod_base = OTHER; note = Nucleotide with phosphorothioate linkage
  modified_base 8: mod_base = OTHER; note = Nucleotide with phosphorothioate linkage
  modified_base 9: mod_base = OTHER; note = Nucleotide with phosphorothioate linkage
  modified_base 10: mod_base = OTHER; note = Nucleotide with phosphorothioate linkage
  modified_base 11: mod_base = OTHER; note = Nucleotide with phosphorothioate linkage
  modified_base 12: mod_base = OTHER; note = Nucleotide with phosphorothioate linkage
  modified_base 13: mod_base = OTHER; note = Nucleotide with phosphorothioate linkage
  modified_base 14: mod_base = OTHER; note = Nucleotide with phosphorothioate linkage
  modified_base 15: mod_base = OTHER; note = 5-methyl beta-D-oxy locked nucleotide with phosphorothioate linkage
  modified_base 16: mod_base = OTHER; note = beta-D-oxy locked nucleotide with phosphorothioate linkage
  modified_base 17: mod_base = OTHER; note = beta-D-oxy locked nucleotide with phosphorothioate linkage
  modified_base 18: mod_base = OTHER; note = beta-D-oxy locked nucleotide with phosphorothioate linkage
ggaaaattttcaatcttt

SEQ ID NO: 571 - DNA, 17 bp, synthetic construct
  source 1..17: mol_type = other DNA
  modified_base 1: mod_base = OTHER; note = 5-methyl beta-D-oxy locked nucleotide with phosphorothioate linkage
  modified_base 2: mod_base = OTHER; note = 5-methyl beta-D-oxy locked nucleotide with phosphorothioate linkage
  modified_base 3: mod_base = OTHER; note = beta-D-oxy locked nucleotide with phosphorothioate linkage
  modified_base 4: mod_base = OTHER; note = Nucleotide with phosphorothioate linkage
  modified_base 5: mod_base = OTHER; note = Nucleotide with phosphorothioate linkage
  modified_base 6: mod_base = OTHER; note = Nucleotide with phosphorothioate linkage
  modified_base 7: mod_base = OTHER; note = Nucleotide with phosphorothioate linkage
  modified_base 8: mod_base = OTHER; note = Nucleotide with phosphorothioate linkage
  modified_base 9: mod_base = OTHER; note = Nucleotide with phosphorothioate linkage
  modified_base 10: mod_base = OTHER; note = Nucleotide with phosphorothioate linkage
  modified_base 11: mod_base = OTHER; note = Nucleotide with phosphorothioate linkage
  modified_base 12: mod_base = OTHER; note = Nucleotide with phosphorothioate linkage
  modified_base 13: mod_base = OTHER; note = Nucleotide with phosphorothioate linkage
  modified_base 14: mod_base = OTHER; note = beta-D-oxy locked nucleotide with phosphorothioate linkage
  modified_base 15: mod_base = OTHER; note = beta-D-oxy locked nucleotide with phosphorothioate linkage
  modified_base 16: mod_base = OTHER; note = beta-D-oxy locked nucleotide with phosphorothioate linkage
  modified_base 17: mod_base = OTHER; note = beta-D-oxy locked nucleotide with phosphorothioate linkage
ccagtactcattaataa

SEQ ID NO: 572 - DNA, 17 bp, synthetic construct
  source 1..17: mol_type = other DNA
  modified_base 1: mod_base = OTHER; note = beta-D-oxy locked nucleotide with phosphorothioate linkage
  modified_base 2: mod_base = OTHER; note = 5-methyl beta-D-oxy locked nucleotide with phosphorothioate linkage
  modified_base 3: mod_base = OTHER; note = 5-methyl beta-D-oxy locked nucleotide with phosphorothioate linkage
  modified_base 4: mod_base = OTHER; note = Nucleotide with phosphorothioate linkage
  modified_base 5: mod_base = OTHER; note = Nucleotide with phosphorothioate linkage
  modified_base 6: mod_base = OTHER; note = Nucleotide with phosphorothioate linkage
  modified_base 7: mod_base = OTHER; note = Nucleotide with phosphorothioate linkage
  modified_base 8: mod_base = OTHER; note = Nucleotide with phosphorothioate linkage
  modified_base 9: mod_base = OTHER; note = Nucleotide with phosphorothioate linkage
  modified_base 10: mod_base = OTHER; note = Nucleotide with phosphorothioate linkage
  modified_base 11: mod_base = OTHER; note = Nucleotide with phosphorothioate linkage
  modified_base 12: mod_base = OTHER; note = Nucleotide with phosphorothioate linkage
  modified_base 13: mod_base = OTHER; note = Nucleotide with phosphorothioate linkage
  modified_base 14: mod_base = OTHER; note = beta-D-oxy locked nucleotide with phosphorothioate linkage
  modified_base 15: mod_base = OTHER; note = beta-D-oxy locked nucleotide with phosphorothioate linkage
  modified_base 16: mod_base = OTHER; note = beta-D-oxy locked nucleotide with phosphorothioate linkage
  modified_base 17: mod_base = OTHER; note = beta-D-oxy locked nucleotide with phosphorothioate linkage
acccagtactcattaat

SEQ ID NO: 573 - DNA, 16 bp, synthetic construct
  source 1..16: mol_type = other DNA
  modified_base 1: mod_base = OTHER; note = 5-methyl beta-D-oxy locked nucleotide with phosphorothioate linkage
  modified_base 2: mod_base = OTHER; note = beta-D-oxy locked nucleotide with phosphorothioate linkage
  modified_base 3: mod_base = OTHER; note = Nucleotide with phosphorothioate linkage
  modified_base 4: mod_base = OTHER; note = Nucleotide with phosphorothioate linkage
  modified_base 5: mod_base = OTHER; note = Nucleotide with phosphorothioate linkage
  modified_base 6: mod_base = OTHER; note = Nucleotide with phosphorothioate linkage
  modified_base 7: mod_base = OTHER; note = Nucleotide with phosphorothioate linkage
  modified_base 8: mod_base = OTHER; note = Nucleotide with phosphorothioate linkage
  modified_base 9: mod_base = OTHER; note = Nucleotide with phosphorothioate linkage
  modified_base 10: mod_base = OTHER; note = Nucleotide with phosphorothioate linkage
  modified_base 11: mod_base = OTHER; note = Nucleotide with phosphorothioate linkage
  modified_base 12: mod_base = OTHER; note = Nucleotide with phosphorothioate linkage
  modified_base 13: mod_base = OTHER; note = Nucleotide with phosphorothioate linkage
  modified_base 14: mod_base = OTHER; note = Nucleotide with phosphorothioate linkage
  modified_base 15: mod_base = OTHER; note = beta-D-oxy locked nucleotide with phosphorothioate linkage
  modified_base 16: mod_base = OTHER; note = beta-D-oxy locked nucleotide with phosphorothioate linkage
cacccagtactcatta

SEQ ID NO: 574 - DNA, 15 bp, synthetic construct
  source 1..15: mol_type = other DNA
  modified_base 1: mod_base = OTHER; note = beta-D-oxy locked nucleotide with phosphorothioate linkage
  modified_base 2: mod_base = OTHER; note = beta-D-oxy locked nucleotide with phosphorothioate linkage
  modified_base 3: mod_base = OTHER; note = Nucleotide with phosphorothioate linkage
  modified_base 4: mod_base = OTHER; note = Nucleotide with phosphorothioate linkage
  modified_base 5: mod_base = OTHER; note = Nucleotide with phosphorothioate linkage
  modified_base 6: mod_base = OTHER; note = Nucleotide with phosphorothioate linkage
  modified_base 7: mod_base = OTHER; note = Nucleotide with phosphorothioate linkage
  modified_base 8: mod_base = OTHER; note = Nucleotide with phosphorothioate linkage
  modified_base 9: mod_base = OTHER; note = Nucleotide with phosphorothioate linkage
  modified_base 10: mod_base = OTHER; note = Nucleotide with phosphorothioate linkage
  modified_base 11: mod_base = OTHER; note = Nucleotide with phosphorothioate linkage
  modified_base 12: mod_base = OTHER; note = Nucleotide with phosphorothioate linkage
  modified_base 13: mod_base = OTHER; note = Nucleotide with phosphorothioate linkage
  modified_base 14: mod_base = OTHER; note = beta-D-oxy locked nucleotide with phosphorothioate linkage
  modified_base 15: mod_base = OTHER; note = beta-D-oxy locked nucleotide with phosphorothioate linkage
ggtcccgacatacat

SEQ ID NO: 575 - DNA, 18 bp, synthetic construct
  source 1..18: mol_type = other DNA
  modified_base 1: mod_base = OTHER; note = beta-D-oxy locked nucleotide with phosphorothioate linkage
  modified_base 2: mod_base = OTHER; note = beta-D-oxy locked nucleotide with phosphorothioate linkage
  modified_base 3: mod_base = OTHER; note = beta-D-oxy locked nucleotide with phosphorothioate linkage
  modified_base 4: mod_base = OTHER; note = beta-D-oxy locked nucleotide with phosphorothioate linkage
  modified_base 5: mod_base = OTHER; note = Nucleotide with phosphorothioate linkage
  modified_base 6: mod_base = OTHER; note = Nucleotide with phosphorothioate linkage
  modified_base 7: mod_base = OTHER; note = Nucleotide with phosphorothioate linkage
  modified_base 8: mod_base = OTHER; note = Nucleotide with phosphorothioate linkage
  modified_base 9: mod_base = OTHER; note = Nucleotide with phosphorothioate linkage
  modified_base 10: mod_base = OTHER; note = Nucleotide with phosphorothioate linkage
  modified_base 11: mod_base = OTHER; note = Nucleotide with phosphorothioate linkage
  modified_base 12: mod_base = OTHER; note = Nucleotide with phosphorothioate linkage
  modified_base 13: mod_base = OTHER; note = Nucleotide with phosphorothioate linkage
  modified_base 14: mod_base = OTHER; note = Nucleotide with phosphorothioate linkage
  modified_base 15: mod_base = OTHER; note = 5-methyl beta-D-oxy locked nucleotide with phosphorothioate linkage
  modified_base 16: mod_base = OTHER; note = beta-D-oxy locked nucleotide with phosphorothioate linkage
  modified_base 17: mod_base = OTHER; note = beta-D-oxy locked nucleotide with phosphorothioate linkage
  modified_base 18: mod_base = OTHER; note = beta-D-oxy locked nucleotide with phosphorothioate linkage
ataacaaagactttcttt

SEQ ID NO: 576 - DNA, 16 bp, synthetic construct
  source 1..16: mol_type = other DNA
  modified_base 1: mod_base = OTHER; note = 5-methyl beta-D-oxy locked nucleotide with phosphorothioate linkage
  modified_base 2: mod_base = OTHER; note = 5-methyl beta-D-oxy locked nucleotide with phosphorothioate linkage
  modified_base 3: mod_base = OTHER; note = Nucleotide with phosphorothioate linkage
  modified_base 4: mod_base = OTHER; note = Nucleotide with phosphorothioate linkage
  modified_base 5: mod_base = OTHER; note = Nucleotide with phosphorothioate linkage
  modified_base 6: mod_base = OTHER; note = Nucleotide with phosphorothioate linkage
  modified_base 7: mod_base = OTHER; note = Nucleotide with phosphorothioate linkage
  modified_base 8: mod_base = OTHER; note = Nucleotide with phosphorothioate linkage
  modified_base 9: mod_base = OTHER; note = Nucleotide with phosphorothioate linkage
  modified_base 10: mod_base = OTHER; note = Nucleotide with phosphorothioate linkage
  modified_base 11: mod_base = OTHER; note = Nucleotide with phosphorothioate linkage
  modified_base 12: mod_base = OTHER; note = Nucleotide with phosphorothioate linkage
  modified_base 13: mod_base = OTHER; note = Nucleotide with phosphorothioate linkage
  modified_base 14: mod_base = OTHER; note = Nucleotide with phosphorothioate linkage
  modified_base 15: mod_base = OTHER; note = 5-methyl beta-D-oxy locked nucleotide with phosphorothioate linkage
  modified_base 16: mod_base = OTHER; note = beta-D-oxy locked nucleotide with phosphorothioate linkage
ccatactcccacatct

SEQ ID NO: 577 - DNA, 16 bp, synthetic construct
  source 1..16: mol_type = other DNA
  modified_base 1: mod_base = OTHER; note = beta-D-oxy locked nucleotide with phosphorothioate linkage
  modified_base 2: mod_base = OTHER; note = beta-D-oxy locked nucleotide with phosphorothioate linkage
  modified_base 3: mod_base = OTHER; note = 5-methyl beta-D-oxy locked nucleotide with phosphorothioate linkage
  modified_base 4: mod_base = OTHER; note = beta-D-oxy locked nucleotide with phosphorothioate linkage
  modified_base 5: mod_base = OTHER; note = Nucleotide with phosphorothioate linkage
  modified_base 6: mod_base = OTHER; note = Nucleotide with phosphorothioate linkage
  modified_base 7: mod_base = OTHER; note = Nucleotide with phosphorothioate linkage
  modified_base 8: mod_base = OTHER; note = Nucleotide with phosphorothioate linkage
  modified_base 9: mod_base = OTHER; note = Nucleotide with phosphorothioate linkage
  modified_base 10: mod_base = OTHER; note = Nucleotide with phosphorothioate linkage
  modified_base 11: mod_base = OTHER; note = Nucleotide with phosphorothioate linkage
  modified_base 12: mod_base = OTHER; note = Nucleotide with phosphorothioate linkage
  modified_base 13: mod_base = OTHER; note = 5-methyl beta-D-oxy locked nucleotide with phosphorothioate linkage
  modified_base 14: mod_base = OTHER; note = beta-D-oxy locked nucleotide with phosphorothioate linkage
  modified_base 15: mod_base = OTHER; note = beta-D-oxy locked nucleotide with phosphorothioate linkage
  modified_base 16: mod_base = OTHER; note = beta-D-oxy locked nucleotide with phosphorothioate linkage
ttcagcattaaccata

SEQ ID NO: 578 - DNA, 16 bp, synthetic construct
  source 1..16: mol_type = other DNA
  modified_base 1: mod_base = OTHER; note = beta-D-oxy locked nucleotide with phosphorothioate linkage
  modified_base 2: mod_base = OTHER; note = beta-D-oxy locked nucleotide with phosphorothioate linkage
  modified_base 3: mod_base = OTHER; note = beta-D-oxy locked nucleotide with phosphorothioate linkage
  modified_base 4: mod_base = OTHER; note = 5-methyl beta-D-oxy locked nucleotide with phosphorothioate linkage
  modified_base 5: mod_base = OTHER; note = Nucleotide with phosphorothioate linkage
  modified_base 6: mod_base = OTHER; note = Nucleotide with phosphorothioate linkage
  modified_base 7: mod_base = OTHER; note = Nucleotide with phosphorothioate linkage
  modified_base 8: mod_base = OTHER; note = Nucleotide with phosphorothioate linkage
  modified_base 9: mod_base = OTHER; note = Nucleotide with phosphorothioate linkage
  modified_base 10: mod_base = OTHER; note = Nucleotide with phosphorothioate linkage
  modified_base 11: mod_base = OTHER; note = Nucleotide with phosphorothioate linkage
  modified_base 12: mod_base = OTHER; note = Nucleotide with phosphorothioate linkage
  modified_base 13: mod_base = OTHER; note = beta-D-oxy locked nucleotide with phosphorothioate linkage
  modified_base 14: mod_base = OTHER; note = beta-D-oxy locked nucleotide with phosphorothioate linkage
  modified_base 15: mod_base = OTHER; note = beta-D-oxy locked nucleotide with phosphorothioate linkage
  modified_base 16: mod_base = OTHER; note = 5-methyl beta-D-oxy locked nucleotide with phosphorothioate linkage
agactctttgacaatc

SEQ ID NO: 579 - DNA, 16 bp, synthetic construct
  source 1..16: mol_type = other DNA
  modified_base 1: mod_base = OTHER; note = 5-methyl beta-D-oxy locked nucleotide with phosphorothioate linkage
  modified_base 2: mod_base = OTHER; note = beta-D-oxy locked nucleotide with phosphorothioate linkage
  modified_base 3: mod_base = OTHER; note = 5-methyl beta-D-oxy locked nucleotide with phosphorothioate linkage
  modified_base 4: mod_base = OTHER; note = Nucleotide with phosphorothioate linkage
  modified_base 5: mod_base = OTHER; note = Nucleotide with phosphorothioate linkage
  modified_base 6: mod_base = OTHER; note = Nucleotide with phosphorothioate linkage
  modified_base 7: mod_base = OTHER; note = Nucleotide with phosphorothioate linkage
  modified_base 8: mod_base = OTHER; note = Nucleotide with phosphorothioate linkage
  modified_base 9: mod_base = OTHER; note = Nucleotide with phosphorothioate linkage
  modified_base 10: mod_base = OTHER; note = Nucleotide with phosphorothioate linkage
  modified_base 11: mod_base = OTHER; note = Nucleotide with phosphorothioate linkage
  modified_base 12: mod_base = OTHER; note = Nucleotide with phosphorothioate linkage
  modified_base 13: mod_base = OTHER; note = Nucleotide with phosphorothioate linkage
  modified_base 14: mod_base = OTHER; note = Nucleotide with phosphorothioate linkage
  modified_base 15: mod_base = OTHER; note = 5-methyl beta-D-oxy locked nucleotide with phosphorothioate linkage
  modified_base 16: mod_base = OTHER; note = beta-D-oxy locked nucleotide with phosphorothioate linkage
ctcagtgatcaaccct

SEQ ID NO: 580 - DNA, 16 bp, synthetic construct
  source 1..16: mol_type = other DNA
  modified_base 1: mod_base = OTHER; note = beta-D-oxy locked nucleotide with phosphorothioate linkage
  modified_base 2: mod_base = OTHER; note = beta-D-oxy locked nucleotide with phosphorothioate linkage
  modified_base 3: mod_base = OTHER; note = beta-D-oxy locked nucleotide with phosphorothioate linkage
  modified_base 4: mod_base = OTHER; note = beta-D-oxy locked nucleotide with phosphorothioate linkage
  modified_base 5: mod_base = OTHER; note = Nucleotide with phosphorothioate linkage
  modified_base 6: mod_base = OTHER; note = Nucleotide with phosphorothioate linkage
  modified_base 7: mod_base = OTHER; note = Nucleotide with phosphorothioate linkage
  modified_base 8: mod_base = OTHER; note = Nucleotide with phosphorothioate linkage
  modified_base 9: mod_base = OTHER; note = Nucleotide with phosphorothioate linkage
  modified_base 10: mod_base = OTHER; note = Nucleotide with phosphorothioate linkage
  modified_base 11: mod_base = OTHER; note = Nucleotide with phosphorothioate linkage
  modified_base 12: mod_base = OTHER; note = Nucleotide with phosphorothioate linkage
  modified_base 13: mod_base = OTHER; note = Nucleotide with phosphorothioate linkage
  modified_base 14: mod_base = OTHER; note = 5-methyl beta-D-oxy locked nucleotide with phosphorothioate linkage
  modified_base 15: mod_base = OTHER; note = 5-methyl beta-D-oxy locked nucleotide with phosphorothioate linkage
  modified_base 16: mod_base = OTHER; note = beta-D-oxy locked nucleotide with phosphorothioate linkage
agtaactgaataacca

SEQ ID NO: 581 - DNA, 17 bp, synthetic construct
  source 1..17: mol_type = other DNA
  modified_base 1: mod_base = OTHER; note = beta-D-oxy locked nucleotide with phosphorothioate linkage
  modified_base 2: mod_base = OTHER; note = beta-D-oxy locked nucleotide with phosphorothioate linkage
  modified_base 3: mod_base = OTHER; note = beta-D-oxy locked nucleotide with phosphorothioate linkage
  modified_base 4: mod_base = OTHER; note = 5-methyl beta-D-oxy locked nucleotide with phosphorothioate linkage
  modified_base 5: mod_base = OTHER; note = Nucleotide with phosphorothioate linkage
  modified_base 6: mod_base = OTHER; note = Nucleotide with phosphorothioate linkage
  modified_base 7: mod_base = OTHER; note = Nucleotide with phosphorothioate linkage
  modified_base 8: mod_base = OTHER; note = Nucleotide with phosphorothioate linkage
  modified_base 9: mod_base = OTHER; note = Nucleotide with phosphorothioate linkage
  modified_base 10: mod_base = OTHER; note = Nucleotide with phosphorothioate linkage
  modified_base 11: mod_base = OTHER; note = Nucleotide with phosphorothioate linkage
  modified_base 12: mod_base = OTHER; note = Nucleotide with phosphorothioate linkage
  modified_base 13: mod_base = OTHER; note = Nucleotide with phosphorothioate linkage
  modified_base 14: mod_base = OTHER; note = Nucleotide with phosphorothioate linkage
  modified_base 15: mod_base = OTHER; note = beta-D-oxy locked nucleotide with phosphorothioate linkage
  modified_base 16: mod_base = OTHER; note = 5-methyl beta-D-oxy locked nucleotide with phosphorothioate linkage
  modified_base 17: mod_base = OTHER; note = beta-D-oxy locked nucleotide with phosphorothioate linkage
ttgctgtaaattattca

SEQ ID NO: 582 - DNA, 18 bp, synthetic construct
  source 1..18: mol_type = other DNA
  modified_base 1: mod_base = OTHER; note = beta-D-oxy locked nucleotide with phosphorothioate linkage
  modified_base 2: mod_base = OTHER; note = beta-D-oxy locked nucleotide with phosphorothioate linkage
  modified_base 3: mod_base = OTHER; note = beta-D-oxy locked nucleotide with phosphorothioate linkage
  modified_base 4: mod_base = OTHER; note = Nucleotide with phosphorothioate linkage
  modified_base 5: mod_base = OTHER; note = Nucleotide with phosphorothioate linkage
  modified_base 6: mod_base = OTHER; note = Nucleotide with phosphorothioate linkage
  modified_base 7: mod_base = OTHER; note = Nucleotide with phosphorothioate linkage
  modified_base 8: mod_base = OTHER; note = Nucleotide with phosphorothioate linkage
  modified_base 9: mod_base = OTHER; note = Nucleotide with phosphorothioate linkage
  modified_base 10: mod_base = OTHER; note = Nucleotide with phosphorothioate linkage
  modified_base 11: mod_base = OTHER; note = Nucleotide with phosphorothioate linkage
  modified_base 12: mod_base = OTHER; note = Nucleotide with phosphorothioate linkage
  modified_base 13: mod_base = OTHER; note = Nucleotide with phosphorothioate linkage
  modified_base 14: mod_base = OTHER; note = Nucleotide with phosphorothioate linkage
  modified_base 15: mod_base = OTHER; note = Nucleotide with phosphorothioate linkage
  modified_base 16: mod_base = OTHER; note = Nucleotide with phosphorothioate linkage
  modified_base 17: mod_base = OTHER; note = 5-methyl beta-D-oxy locked nucleotide with phosphorothioate linkage
  modified_base 18: mod_base = OTHER; note = beta-D-oxy locked nucleotide with phosphorothioate linkage
tagtcatttctaacttct

SEQ ID NO: 583 - DNA, 16 bp, synthetic construct
  source 1..16: mol_type = other DNA
  modified_base 1: mod_base = OTHER; note = beta-D-oxy locked nucleotide with phosphorothioate linkage
  modified_base 2: mod_base = OTHER; note = beta-D-oxy locked nucleotide with phosphorothioate linkage
  modified_base 3: mod_base = OTHER; note = beta-D-oxy locked nucleotide with phosphorothioate linkage
  modified_base 4: mod_base = OTHER; note = Nucleotide with phosphorothioate linkage
  modified_base 5: mod_base = OTHER; note = Nucleotide with phosphorothioate linkage
  modified_base 6: mod_base = OTHER; note = Nucleotide with phosphorothioate linkage
  modified_base 7: mod_base = OTHER; note = Nucleotide with phosphorothioate linkage
  modified_base 8: mod_base = OTHER; note = Nucleotide with phosphorothioate linkage
  modified_base 9: mod_base = OTHER; note = Nucleotide with phosphorothioate linkage
  modified_base 10: mod_base = OTHER; note = Nucleotide with phosphorothioate linkage
  modified_base 11: mod_base = OTHER; note = Nucleotide with phosphorothioate linkage
  modified_base 12: mod_base = OTHER; note = Nucleotide with phosphorothioate linkage
  modified_base 13: mod_base = OTHER; note = 5-methyl beta-D-oxy locked nucleotide with phosphorothioate linkage
  modified_base 14: mod_base = OTHER; note = beta-D-oxy locked nucleotide with phosphorothioate linkage
  modified_base 15: mod_base = OTHER; note = 5-methyl beta-D-oxy locked nucleotide with phosphorothioate linkage
  modified_base 16: mod_base = OTHER; note = beta-D-oxy locked nucleotide with phosphorothioate linkage
attgaagcaactcaca

SEQ ID NO: 584 - DNA, 19 bp, synthetic construct
  source 1..19: mol_type = other DNA
  modified_base 1: mod_base = OTHER; note = beta-D-oxy locked nucleotide with phosphorothioate linkage
  modified_base 2: mod_base = OTHER; note = beta-D-oxy locked nucleotide with phosphorothioate linkage
  modified_base 3: mod_base = OTHER; note = 5-methyl beta-D-oxy locked nucleotide with phosphorothioate linkage
  modified_base 4: mod_base = OTHER; note = beta-D-oxy locked nucleotide with phosphorothioate linkage
  modified_base 5: mod_base = OTHER; note = Nucleotide with phosphorothioate linkage
  modified_base 6: mod_base = OTHER; note = Nucleotide with phosphorothioate linkage
  modified_base 7: mod_base = OTHER; note = Nucleotide with phosphorothioate linkage
  modified_base 8: mod_base = OTHER; note = Nucleotide with phosphorothioate linkage
  modified_base 9: mod_base = OTHER; note = Nucleotide with phosphorothioate linkage
  modified_base 10: mod_base = OTHER; note = Nucleotide with phosphorothioate linkage
  modified_base 11: mod_base = OTHER; note = Nucleotide with phosphorothioate linkage
  modified_base 12: mod_base = OTHER; note = Nucleotide with phosphorothioate linkage
  modified_base 13: mod_base = OTHER; note = Nucleotide with phosphorothioate linkage
  modified_base 14: mod_base = OTHER; note = Nucleotide with phosphorothioate linkage
  modified_base 15: mod_base = OTHER; note = Nucleotide with phosphorothioate linkage
  modified_base 16: mod_base = OTHER; note = beta-D-oxy locked nucleotide with phosphorothioate linkage
  modified_base 17: mod_base = OTHER; note = beta-D-oxy locked nucleotide with phosphorothioate linkage
  modified_base 18: mod_base = OTHER; note = 5-methyl beta-D-oxy locked nucleotide with phosphorothioate linkage
  modified_base 19: mod_base = OTHER; note = beta-D-oxy locked nucleotide with phosphorothioate linkage
tacaagaaaattaatttct

SEQ ID NO: 585 - DNA, 16 bp, synthetic construct
  source 1..16: mol_type = other DNA
  modified_base 1: mod_base = OTHER; note = beta-D-oxy locked nucleotide with phosphorothioate linkage
  modified_base 2: mod_base = OTHER; note = 5-methyl beta-D-oxy locked nucleotide with phosphorothioate linkage
  modified_base 3: mod_base = OTHER; note = beta-D-oxy locked nucleotide with phosphorothioate linkage
  modified_base 4: mod_base = OTHER; note = beta-D-oxy locked nucleotide with phosphorothioate linkage
  modified_base 5: mod_base = OTHER; note = Nucleotide with phosphorothioate linkage
  modified_base 6: mod_base = OTHER; note = Nucleotide with phosphorothioate linkage
  modified_base 7: mod_base = OTHER; note = Nucleotide with phosphorothioate linkage
  modified_base 8: mod_base = OTHER; note = Nucleotide with phosphorothioate linkage
  modified_base 9: mod_base = OTHER; note = Nucleotide with phosphorothioate linkage
  modified_base 10: mod_base = OTHER; note = Nucleotide with phosphorothioate linkage
  modified_base 11: mod_base = OTHER; note = Nucleotide with phosphorothioate linkage
  modified_base 12: mod_base = OTHER; note = Nucleotide with phosphorothioate linkage
  modified_base 13: mod_base = OTHER; note = 5-methyl beta-D-oxy locked nucleotide with phosphorothioate linkage
  modified_base 14: mod_base = OTHER; note = beta-D-oxy locked nucleotide with phosphorothioate linkage
  modified_base 15: mod_base = OTHER; note = 5-methyl beta-D-oxy locked nucleotide with phosphorothioate linkage
  modified_base 16: mod_base = OTHER; note = beta-D-oxy locked nucleotide with phosphorothioate linkage
actaagtcattacact

SEQ ID NO: 586 - DNA, 18 bp, synthetic construct
  source 1..18: mol_type = other DNA
  modified_base 1: mod_base = OTHER; note = beta-D-oxy locked nucleotide with phosphorothioate linkage
  modified_base 2: mod_base = OTHER; note = beta-D-oxy locked nucleotide with phosphorothioate linkage
  modified_base 3: mod_base = OTHER; note = beta-D-oxy locked nucleotide with phosphorothioate linkage
  modified_base 4: mod_base = OTHER; note = beta-D-oxy locked nucleotide with phosphorothioate linkage
  modified_base 5: mod_base = OTHER; note = Nucleotide with phosphorothioate linkage
  modified_base 6: mod_base = OTHER; note = Nucleotide with phosphorothioate linkage
  modified_base 7: mod_base = OTHER; note = Nucleotide with phosphorothioate linkage
  modified_base 8: mod_base = OTHER; note = Nucleotide with phosphorothioate linkage
  modified_base 9: mod_base = OTHER; note = Nucleotide with phosphorothioate linkage
  modified_base 10: mod_base = OTHER; note = Nucleotide with phosphorothioate linkage
  modified_base 11: mod_base = OTHER; note = Nucleotide with phosphorothioate linkage
  modified_base 12: mod_base = OTHER; note = Nucleotide with phosphorothioate linkage
  modified_base 13: mod_base = OTHER; note = Nucleotide with phosphorothioate linkage
  modified_base 14: mod_base = OTHER; note = Nucleotide with phosphorothioate linkage
  modified_base 15: mod_base = OTHER; note = beta-D-oxy locked nucleotide with phosphorothioate linkage
  modified_base 16: mod_base = OTHER; note = beta-D-oxy locked nucleotide with phosphorothioate linkage
  modified_base 17: mod_base = OTHER; note = beta-D-oxy locked nucleotide with phosphorothioate linkage
  modified_base 18: mod_base = OTHER; note = beta-D-oxy locked nucleotide with phosphorothioate linkage
aatgttcaatttctattt

1. (canceled)

2. (canceled)

3. (canceled)

4. (canceled)

5. (canceled)

6. (canceled)

7. (canceled)

8. (canceled)

9. A nucleic acid molecule of 12 to 30 nucleotides in length comprising a contiguous nucleotides sequence of at least 12 nucleotides which is at least 95% complementary to a mammalian C1R target sequence, wherein the nucleic acid molecule is capable of inhibiting the expression of a C1R mRNA.

10. The nucleic acid molecule according to claim 9, wherein the contiguous nucleotide sequence is fully complementary to a sequence selected from the group consisting of SEQ ID NOs: 3 and 6.

11. The nucleic acid molecule according to claim 9, wherein the nucleic acid molecule comprises a contiguous nucleotide sequence of 12 to 25 nucleotides in length.

12. The nucleic acid molecule of claim 9, wherein the nucleic acid molecule is a RNAi molecule.

13. The nucleic acid molecule of claim 9, wherein the nucleic acid molecule is a single stranded antisense oligonucleotide.

14. (canceled)

15. The nucleic acid molecule according to claim 9, wherein the nucleic acid molecule comprises one or more 2′ sugar modified nucleosides.

16. The nucleic acid molecule according to claim 15, wherein the one or more 2′ sugar modified nucleosides are independently selected from the group consisting of 2′-O-alkyl-RNA, 2′-O-methyl-RNA, 2′-alkoxy-RNA, 2′-O-methoxyethyl-RNA, 2′-amino-DNA, 2′-fluoro-DNA, arabino nucleic acid (ANA), 2′-fluoro-ANA and LNA nucleosides.

17. (canceled)

18. The nucleic acid molecule according to claim 9, where the contiguous nucleotide sequence comprises at least one phosphorothioate internucleoside linkage.

19. The nucleic acid molecule according to claim 18, wherein at least 90% of the internucleoside linkages within the contiguous nucleotide sequence are phosphorothioate internucleoside linkages.

20. The nucleic acid molecule according to claim 9, wherein the nucleic acid molecule, or contiguous nucleotide sequence thereof, comprises a gapmer of formula 5′-F-G-F′-3′, wherein regions F and F′ independently comprise 1-4 2′ sugar modified nucleosides and G is a region between 6 and 18 nucleosides which are capable of recruiting RNase H.

21. A pharmaceutically acceptable salt of a nucleic acid molecule according to claim 9.

22. A pharmaceutical composition comprising a nucleic acid molecule according to claim 9, or a pharmaceutically acceptable salt of the nucleic acid molecule and a pharmaceutically acceptable excipient.

23. An in vivo or in vitro method for inhibiting C1R expression in a target cell which is expressing C1R, said method comprising administering a nucleic acid molecule according to claim 9, a pharmaceutically acceptable salt of the nucleic acid molecule, or a pharmaceutical composition comprising the nucleic acid molecule in an effective amount to said cell.

24. A method for treating a disease comprising administering a therapeutically or prophylactically effective amount of a nucleic acid molecule according to claim 9, a pharmaceutically acceptable salt of the nucleic acid molecule, or a pharmaceutical composition comprising the nucleic acid molecule, to a subject suffering from or susceptible to a neurological disease.

25. A method according to claim 24, wherein a neurological disease is selected from the group consisting of a tauopathy and schizophrenia.

26. (canceled)

27. (canceled)

28. (canceled)

29. (canceled)

30. (canceled)

31. A method for diagnosing a neurological disease in a patient suspected of a having a neurological disease, said method comprising the steps of
a) determining the amount of one or more C1R nucleic acids in a sample from the subject, wherein the determination comprises contacting the sample with one or more nucleic acid molecules as defined in claim 9,
b) comparing the amount determined in step a) to a reference amount, and
c) diagnosing whether the subject suffers from the neurological disease, or not, based on the results of step b).

32. The method of claim 31, wherein the sample is contacted in step a) with said one or more nucleic acid molecules under conditions which allow for the hybridization of said one or more nucleic acid molecules to said one or more C1R nucleic acids present in the sample, thereby forming duplexes of said nucleic acid molecules and said C1R nucleic acids.

33. A method for manufacturing a nucleic acid molecule as defined in claim 9, comprising reacting nucleotide units and thereby forming covalently linked contiguous nucleotide units comprised in the nucleic acid molecule.

34. The method of claim 33, wherein the method comprises the introduction of one or more sugar-modified nucleosides, of one or more modified internucleoside linkages, and/or of one or more modified nucleobases into the nucleic acid molecule.
